United States Patent Application Publication US 2022/0211063 A1 - sequence listing, part 10

SEQ ID NO: 9 - DNA, 4395503 bp, Penicillium roqueforti (residues 1-1,465,168 of 4,395,503)
  misc_feature (85031)..(85335): n is a, c, g, or t
  misc_feature (96911)..(97034): n is a, c, g, or t
  misc_feature (167456)..(168880): n is a, c, g, or t
  misc_feature (174644)..(174784): n is a, c, g, or t
  misc_feature (186874)..(192764): n is a, c, g, or t
  misc_feature (360720)..(360911): n is a, c, g, or t
  misc_feature (391859)..(392018): n is a, c, g, or t
  misc_feature (496616)..(496804): n is a, c, g, or t
  misc_feature (596148)..(596377): n is a, c, g, or t
  misc_feature (682735)..(683365): n is a, c, g, or t
  misc_feature (719025)..(719113): n is a, c, g, or t
  misc_feature (843411)..(843580): n is a, c, g, or t
  misc_feature (1092789)..(1092960): n is a, c, g, or t
  misc_feature (1157612)..(1162711): n is a, c, g, or t
  misc_feature (1192629)..(1192806): n is a, c, g, or t
  misc_feature (1228309)..(1228420): n is a, c, g, or t
  misc_feature (1338837)..(1338992): n is a, c, g, or t
  misc_feature (1570220)..(1570421): n is a, c, g, or t
  misc_feature (1572469)..(1573106): n is a, c, g, or t
  misc_feature (1778958)..(1779105): n is a, c, g, or t
  misc_feature (2068448)..(2068525): n is a, c, g, or t
  misc_feature (2226907)..(2227126): n is a, c, g, or t
  misc_feature (2309629)..(2309784): n is a, c, g, or t
  misc_feature (2399286)..(2399465): n is a, c, g, or t
  misc_feature (2468194)..(2468410): n is a, c, g, or t
  misc_feature (2498732)..(2498791): n is a, c, g, or t
  misc_feature (2576563)..(2576818): n is a, c, g, or t
  misc_feature (2701365)..(2701585): n is a, c, g, or t
  misc_feature (2766468)..(2766583): n is a, c, g, or t
  misc_feature (2901265)..(2901529): n is a, c, g, or t
  misc_feature (2994270)..(2994415): n is a, c, g, or t
  misc_feature (3046136)..(3046256): n is a, c, g, or t
  misc_feature (3064281)..(3064611): n is a, c, g, or t
  misc_feature (3131064)..(3131222): n is a, c, g, or t
  misc_feature (3154998)..(3155745): n is a, c, g, or t
  misc_feature (3156700)..(3157011): n is a, c, g, or t
  misc_feature (3186962)..(3187622): n is a, c, g, or t
  misc_feature (3198509)..(3198780): n is a, c, g, or t
  misc_feature (3203214)..(3205188): n is a, c, g, or t
  misc_feature (3205915)..(3206227): n is a, c, g, or t
  misc_feature (3207673)..(3207831): n is a, c, g, or t
  misc_feature (3257366)..(3260963): n is a, c, g, or t
  misc_feature (3261769)..(3386768): n is a, c, g, or t
  misc_feature (3388230)..(3394660): n is a, c, g, or t
  misc_feature (3513991)..(3514321): n is a, c, g, or t
  misc_feature (3520839)..(3521231): n is a, c, g, or t
  misc_feature (3528652)..(3531206): n is a, c, g, or t
  misc_feature (3533597)..(3533708): n is a, c, g, or t
  misc_feature (3544084)..(3544271): n is a, c, g, or t
  misc_feature (3640948)..(3641139): n is a, c, g, or t
  misc_feature (3768143)..(3769865): n is a, c, g, or t
  misc_feature (3862492)..(3862826): n is a, c, g, or t
  misc_feature (3867863)..(3868500): n is a, c, g, or t
  misc_feature (3874062)..(3874753): n is a, c, g, or t
  misc_feature (3907446)..(3907673): n is a, c, g, or t
  misc_feature (4023526)..(4023682): n is a, c, g, or t
  misc_feature (4214599)..(4214744): n is a, c, g, or t
  misc_feature (4215831)..(4216343): n is a, c, g, or t
  misc_feature (4384545)..(4386964): n is a, c, g, or t
  misc_feature (4389389)..(4392902): n is a, c, g, or t
  misc_feature (4395501)..(4395501): n is a, c, g, or t
tacagttctaccgtaatcctaagtccggtcaagctttttttgtcaatggtgacttgggtaaagataggttttggagagagttttgtgaaaagaaaaagtaagcttaatggacaaaagaatttcacgcagctgcttttgtcctgctttgatctattttatagttagcctgcagttctccagacatataacagaatgagggaattacatttaagatccttgtcaacgattgaaactacatatttcggaagcagactcgttttatacgttacagattgacagggagcattccattaagaggtcgaacatattggaacacgtatagacaggagccttcagtaaaccatcagaatcaagtgaacgccgtaaattggctactgatatacctctgtccaaatttcaatttcacgcaggggtaaagagcttcaacgttctttctgtcagtggtttcgatactaacaaagcgtagtgcttccagaagccttttgaaagggattttcactccatggtttccacataatatatgatagagaatgtctgtcatatcttcaatcgtcagtgtgggtaaatgatgacggatcttggaagcacaaaccaggacgagtcagttccttcgaataagtattttagattccaaacaagccctctgggctcagagcttccctccatagatgccaaatagcttcacacgcttgcaggtctaatctttcgaaggcagatctatagaagttctccaggcgagctgcgtcgcaacgtttgagattcgagtgtgtattttccaggtttggatggttccaagttacaaattgctcaattaatgagaaggcaggctcattagaaaagaactttttgcaatgggtggaaaacagcgggctcctagttgagagagaccctcgcgcagtattgtcgttcatagggagggggctggatcggaggagcacacaaccgttgcgcccattatgcctttgtctcctatacaatctcgtatatcagcaatcaagcatgggaataatatttacctctttccaagctctggggcacagcttgccttgacttgggccattccatccctaggaatgacttctgaatactgccaaatttgcttcctggccgtggaacccaattgtgcgattgacgagggtataataattgaagtcctggggcctgctttcttccacctgaggcaaggctggctgtgatttaccagagttggcctgcaagtactgaacagagaaattctcggccataccattttttgggtaataaacaccatttataacttcgtggattggccttaaggactctagacgtcaggcagtggtggattacctgtttcgaagggatgactgttgatactcccactgagcggatataaatggggactcggcaccggggtgctggaagtttgggaatgtacatgtggaggccagtggccattgttgtttgccatagtccaaagaatcgaagttgagatgtttcgggggcacactgcgaatgaagagggccggtcgtaccaggctggagatcaaggacgcagcgctctgggcgggagttatatacgttatgaagggtaatgaccttccatcattacgtaagagagcctttcacgcttcgccgtgttgggtggggaaacttgtgatgcatgccgtcgccctgactggctaacgagatctggggcacttcttgatttggaattctcatgagagatgagagtatttgggaataatccacaaaaaggccaggggcgctttacaacgatatttacacaaggggtgagtaggattagctactcagacacttcgctgcagcgaatatggagcatatgtagggcacgtccgtctcgatacaagcgcagtcaaaaaatgaaaattaccattttattgaaaggtattgtaatatttacatccgtgcgccgaggtatattactccattccaaaatcttaatatactaagagaaatcccccaagtagtttgtcctctcgattgtgcatacacctgtcctccccctctgcatttatcatagaaatggacggcaccaatatggtaagggcaattgtgttcgcttcttttcccatactaagattgattatacagattcccgaagccgacctcgagatatcagcccgaatatcattgacagctttgcaaatttggtggctgggtaccccagacctgaaagacgcaattaaacagcatcacaaactcgatcctgggattgcatcactagtgctggcctgtcaacgtctcaggaagaatggatacagaaagggacggatccctcttacccagaacagcattttaaatcgacatgtgcaagccatggtggatgacctcaccgaagacacgctcaaaatatttggccttctcacctgtcacttcaacgaagattttggagtgcctctcccccgtcagcttcttcgattcttcgataccccctggaagcttctcggctatcgaagctatcactcccactccaaaacctggaatatacaaagggagatccccatgcaagttgcttgccccttcgattgtgcatacacctgcccagtcctcaacctctgcacttatcatagaaaaggacggcatcgatatggtaagggcaagattgttcgcttcttttcccatactaagatttattatacactttccccaagccgacctcaagatatcagcccgaatattattaacagctttgcaaatttggtggctgggtaccccaggcctggaagacgcaatttaacggcaacgcaagctcgatcctgggattgtatcactagtattggccagtcaacgtctcaggaagagtggatacagaaagggacggatccctctaacccagaacagcattttaaatcgacatgtgcaagccatggtaaaagagcattgcggacaaacggttggtgggatatccagtagatgagcatgccgtacacttcgtcataatatgaaacatgggttgtcgaagctgctggctgtcagactcatcccatcgcaaaggaagaattacgtactgaagtagcctctcactagctcatcagcagcatcgcaatactttacttgcgttattcacgtttatgatattggccggtcaaggctttattcgtgctcaattcattagattttggttcatatgcatgaaacccatgcctgtgcaaccactaacttcgatttattttcgcgatatccaagccccaaggcccccaagcaccagaagactctctgagtggcatcaattgggtcaattttactttccctttattccctagtcataacaatccttgtgtgtataagaccatgtctgtgggtccaatccacgtcggtatgtaccttgaccagaacaatacctcaatcactaatttgcttcatagcttcaagttgctatattcagcccgaggaaggttgtgattttgatatgtggtttctgagttcaaggaaggattttattataactatttttgtacttctaggcagagctcgataataggtccagtcaatatatatttgtaaaacgaaatctttaactatgcggaacgattcattaagcttaaagaatattgatatgccattttttcattagtagaatgtttcctttgttaagaccatttcaacataaaagctcaaaatgcagtagacggagacttcggatagcctaacaatctaccattaccctccaatttgtgctgctctttcttttctacttctcattcgctctaattccaccatatctactatttttgtactgccgcttaatatgtatcccaatccaatacacagactaaaaggaaggaaagtcggattctggacggaaattcactggtggttcatacgcaatgtatagttgttcaggtcaggagcgcggtggaagatcttctggtagatctccgtgagcatacgggcatcggcgcggatggtaggtgatatatttccattttggacaaggaagccgattgtgcgtttgaggatacgctcgagatcatgttcagcgactagtttgctcaggcttgacatgtaggtcgcggagagaacaagcatgttgccaaattgcctatataacatgaaagatcattagtattgccctttagcgtccacatttctccagattagttgggtccgcatacgaatgggcagtgccaaagatattggttaccaccaaccgatgggtatctacacaatcaaaagccacagtactccgaattgcagaatcaatacagatcttacaggcatcctgtaaattttcaggcagcgcccggagttggacttcagcggcggtcgatccgttagcgagtgaggtggttggtgttttggccatgtttagagcataggtgccatgcagagcgtggtagaggaacggtcggtggataatatacagggcaccgtagtacgttgcccgcatgtgggcggcgtttatttcattggctggctcgtcggtttccttccactgcatactgtcgggcagggatctgcgccagagatccaggttttcgctcaaagctccttgggcggtatatgaccacagtgtttccccctgttttttgattttgtagaggtcggtcgggactcgattcaggattttgcgcaggtggatttgagcgtagtagaacatcatgatcatacttgggcttgtactgaagtgttctgggagactaattgtgaattgtcctttagggaggtgcatccgaccttctgaatgagagatgccactggctggaagatcaagccctgcaagtaagtcactctccaactctaggcatgcccagtatacggagctatggaggtccttcactgagccctggttgagactttcataccgctttggtcttgtcagcacctgacaagccctcgaggcttgtgaaatccaactatgactctgaaacggatgagctagctggccggcatatagtccagcaagcagccccgcctgaacgtgctccagctcgtttgcaccctgcaagtggctcaaaattcctgtagcatatctgtacagcgtaataccagggatgctttggttgttcatcgtattcgcatcttcattgcgcattgtgggcgagagtgcaccgttcgcataatctgtctcgatatgggcgggaagaggtgatgtggtgcgctggccgcggtagccgatcttcctgttcatgatagaccccgagaggggagtaggagcttcgcaaattgcacccagggccaggcatagcaatactatggaactgtgaatatttcgatccacgcgtggtcgtggcgagttgcagcaggtctccttatcctcgctgtgtataccaaggctgcgattgaagctcctccgtttcttcgacggtggctcatcgcgtgctggctgtacacagtcggtgacagagcctggagaggaattgaagtggcagtaagattgaataaacctattcaccttgttgtcgagttcattccgatcaaggaacgggtgaagcttatacatgttagagaggtagctcccaaagtaacgttgagctgcgacaccacccagcttcacgttaccaagcatatcaatatcgacgtctccgtcaaatcccactctgcacccatcaggtccgtggctacaaacgccgggatccaatggtaaggggctgttatccagagtgtccagcatctccccatgatcatacgtgctaagaagaccgcgctcctcttctaaccgtatcacataatcttcgtcgtatctgtccggtaacagctgctggatcgagggccacagcaacaaatttcgggccgcagtgtgctgaacgggggtcgaaagcgcatattcagcctcaagcttggagccgacgtgaattggattcacaaggccaagattctgaccataatttggaacagccacaccatgtcccctgaaattcaatagactcctctctgtgaggtgggttaatgtctcgtcttgtcctaggagagagacgatgttaccggaatgttcatgtgtaccctgaataggcttgtagggctggtttgggtttccttgcgcagacaacatttgattttgtagcgttcgaaattgggctgtaaagttgtcctccatcttcgtcaaatggtctagcaaagtttgagtagacctattttccttgcgtagcgactcctctttatacgagcatggcagattgctttctctgcagtagccacaatttggtcgtccctcatcacacttggcctttttagctcggcatctatcacaggcctatagctctcgatgtcagctatatctttctcagggcaaaccagccaactaacctgcgcggcccttgcagccttcgcggtcctacgctggtgcggtccataggcctggtattggccaatcaccgagccaaccatttgtggaatggatgccattatgtgcgaatgtagaacaaaaagatccggttcttgtcgggcttttggttgtatcaactttcagttaaaacggttagagaaattcaaaacaaacgagcttgctttacaaacgaacccgtctaaaatcgttcgtttgtgttcgatgtagtaagataatgtcgaataagaagtttggaactttcagctagtggttgaatctgaatgtgcaacactatcgcaggctaatatgctcgcccttgagtcaccgtagcgtattcttggactgcgtagagataactgatgagcaagctgatttccccccgtgtatttaagaaaaaggccgaaatagaaaaactaagagcaaaaactgactatcataatttacagagttgaataagtacgaatcgcacggaaataggtggctgagagcgagtgctcgtaacaccacactaaagtatccacctcatttccagacttctggttccgctccattcctccattagttcactgatcactcagctccttgattaaagtgctattcttgaccgcattaaatttccacctcaacattcaaaaccgcattcgcaatatgcacgaggtgcttttattcgatactaaatcacatttacttaatccaatggtggggtaaatataatgtcgtcctcataacccacacctaccctcatagctatctccatctctagggattaggtaaagggggattgaccgcatatccccagtcccgcaagaaatcgggcgcagcacagctgataatatgatcctcggacacttagtaccattttaaattaccactaatgcattcaaggatttaattgtcacattcctagcttttcatgatccggtgcggtctatagatcagtgaagagaggttctacccgggcgatgtgatagctgatggatgatacatgaagagcccaattcccaaccatttatcaatatagctttcaaaatccctcccacggattacttcggctcaaagcactcacgaacggctctcaaagtcattttaggtcggcagttgcaatgttccagagaaacatgccttgtcccggttggcaaaagccttgggtctttctgcgaagtgtgctgatcgatgctgggtcaggttggactaggccccttgggatacgtaatagcttggtttaatcacaacaaagttattggtggagacttttaatcatggtagcctgtagtggctttgggtctggatgttcatttctgggaaccccggccatgcaatgcgctaaaatgaaaatttcagacgtgtcaggcgactgacgccaattgattgggccataagctttgcttcagggactagatctgagcgttggtacaaaagacaagtgctagtctaactgcgatggtgctgcagtagcaccagtccggcaacactagtttctttaatactacgtgtgaccctgttataacataaatgagatttaaatacccaatgtcagttattttactccttcatcgttcttctgttgtttttgttcatggagggaattatgaccaccaaaaacccgttctcccaacaaccatcaatatctggtgacccgatggcaattagttcactcttgaatgatcaaacattatcctcgcaccagtatccacgacctagctcacacaagacgtcccagggccctggaagtgccatgtttcgggcagtcaagttgtcggcatcatccgtccaggaaaacggcacccataccaagagtctgaatttgcaagatcaagagcaggattcattttcagatcgacaagcccgttcttccaatcccatcaaatgtgggatcaccaagaacgaaactccgccccgccaccgcctgtctcagaaagtatacaataaagaagaaacgcatttcatttggttccaccgcgtcattctcagggataaatggccggatgttcttgagaaattcagccgtcaatttccaagccgaccacgccgtagctatggaggacttgaaggcaggctccgaagatttctccaggaagaaacgttgtcctcttcccaaaagaaaaatcagggctggaagtatgggggaaagggtgggcaagccatttcctatacgagtagcgagggtgttgttcatatatgcacgtacccgtggatgcaggaaactgccggtccccaatccaaagtccaaagtcattctcaaaagaattgccggtattagactatgtttgcttaaaacccaggatataccgttcaaaaattcaatagccattgacgtgttctatatacaaccatcttcagtcagcctaaaaaggaaaaggatatggtaattcatacaaggtagatttttcatcatctgacttactcataaacgtacaaaggtagcatatcataagtgatatacatttctgtcacctgctggctgatcataccaactctagacacccaagagcaatgtgtaagttatgtattgttcatccaatctaggttgagaagacgcaggtttattttcgtttctttgtccaatatccatctttgaaccgttcggccgcttgaatttcaaatactgaaggatacttctccatgtaatcctgcacaatgctcaacgattgcagaacttggatcttttcaagatactctgcgaattaaacagaggctgctctcatggcatttcgactctgacttagctcaaagaagcgactaggccatgaaacccgggtatctgatgaatcgagggagcagtgcacgttatggtgataggctgagcgatcggcaacaagagcttcggaagcaccgttagggaaaaagggaagtcgggtttccaggattgcaggatcgttcggtggtaagaatgaaaaaggtgtgacagaagattgttgacttctcgagaacaggccggaatccatgtattagcagaccggtacgtgactgaaactttatagttcttgagtcatcctggatttgtggaagggatttgtggaagtatcagtcaatttggcaattcaaacctctcgcccatgggtctagcaaaagagaccatgttggtatccatctcaggtcggattggctttgactcgacatgtctctcttgtggccgccgttggcgattccagcacattttaccccttcgacgacgcggggcttgacctgcagtgtgtcacacacaattccgttgtttttggagccagtttgaatacatttgacttccactcccatggatcttctggagagtattgtggtgaagtacatgagcttggataactcatacgacccaaaaagaacagatctcgggtgcccatgttgacacagaggaggctcccttcaatggatgcgtgagcttcgagtatactagtaaaagggctgcttcagtatatttctcaaccatgaaccgtgtatatgatggtggatgagaataaaaatgagggttggacattgccggtgagtggtttattcctccattattggagatttggggtggcacgtttttctcgctctcgggcattgtagtagtgagacctctgatcacatgtccttctacgcgagtatgtgagcgttcctattggacgataatagttggtccgagatggccgcaactgacctcaatgccttggtctgaaccttgacctattttgtgggctgcatgaagcaggtcttcgcagtggttgatcctcgttatcacgggcccacgcacgaattttagaggtaatgtcgtatttcctttcagatcgagcaggatggcacgcttatgaatggtaatactttcatcctgggacccacgacgcattattattgaatgtcaagagcacataaagtacgaagctatacctaggcattactaggggtaatatgtcataaggtcgtcagtcgatacattcccgctcacattctgatctctaatcatcgtcctcattcccttagtgataagttagaggaaaccggttcctcaagcacactcaactttcctctatccagtcttccctgactctactttccagaatgacatggctataaggcggacttatggatgcaaaatcccaagacaatccagattcaggtaacatctcggtagtggtgaacgggagtatccatgcgcatccggcgaaaactgctatggtatcatattctcgtgcttagttccttgttgccttttgctaatgaatccttaaggtacaccccatacccatccaggtcaatgccaagtcgatttcgccttccatcaaggagattcctaggggtcaggtacgtttggccacaaaattccactgagagaccttccatctccaaatgacctgttgctgacctttatttgtttacgcatgacccacagcccgcgcaggatgaagaaaccccatccagtcagcctctttccgattccaacgaactgagacacactcaggtacccataacgcgatttttggataagtgaaatagacattgacttgtaccaggcaccatcggctgtcgtgaaaagagcaacggtatcaaacacaagccccagacgacgtataccctcaaagactgcgaattcgatggagaatccatgttatccaacggaagtgcaagatctacgagtgaattacagttctaccgtaatcctaagtccggtcaagctttttttgtccacggtgacatggatatagatacgttttagagagagttttgtggaagagaaagtgtgcttaattaaaaaaagacagcaggttgcaataaaacatgggaactaagtgagggccgtaaaatggctactgatttaactctctccaaatttcaatctcacgcaggagtaaacgagtttcgacgttccttcggtcagtggcttcaatactagcaaagtgtagtgcccccagaagccgtttgaacggaagtttctctccgtggtttccacgcaatatataatagagaaagtctcccggatcgtcaatggtcaatggtgatggggcttggatgcagaaaccagaacatggcggtttctgtaaataagtattttggattccacccaagatacttagatccagaactcccatccatgcagccaaaatagcttcacacgcgaccaggttcaatcctcggaaggcagatctatagaaatcctccaggcgagctgggtcgcaacgtttgagattcgacagtgttttttccaggactgtattattttgagccacaaattgatcaatcaatgagaagtcaggctcattaggaaagacctttttgcaatgggtagaaaacagcgggctcccctggaataccgtctgcatcctgccaaatgctgccctctggccgtaaaacccaatggtgcgattgacttgggcatattcatattcctgaaaacttattgcttcgtcttgggaatatagaacgaaattcccttccgcctggagcgaggccggctgtgatttattgcagctggcctgtgggtactgaacagggaggtactgaacagggaatctctcggtcatgctctcttatttttactaattagcaccatttataacctcatggattgactttcaagaatatggatacaggcagtggtggattggtggattacctgtttcgaatggaggtttgatgatactcgcactgggtggatctgaccggggactcggttcaagggcaatggtgaaaggtgggaaatgctgatttggaggccagtggccattgttgtttgccatgattctaaagaatcgaagttgagatgtttcggaggcagattgtgaacgaagagagtcgctcgtactaggtcaaagatcaaggacgcagcgcggatgggcggggggttatatacgttgtgaaggagaatgaccctccttccttgattatgagagcctttcacgcttcgccgtgttgggtggggaaactttttatgcataccgtcgctctgactggctggctggttctggggcgcttattgatttatgatccttatgagagtattggggagaatccacaaaaaggccaggagcgctattacgaggaaatatacccaaggggtgagtaggattggctgctaggacttcgctgcggcgagtatggagcaatcgtgaactactaacgagggcacgtctgtctcgatacaagcgcagtcaaaaaatgaaaattaccattttattgaaaggtattgtaatatttacatccgtgcgccgaggtatattactccattccaaaatcttaatatactaagagaaatcccccaagtagtttgtcctctcgattgtgcatacacctgtcctccccctctgcatttatcatagaaatggacggcaccaatatggtaagggcaattgtgttcgcttcttttcccatactaagattgattatacagattcccgaagccgacctcgagatatcagcccgaatatcattgacagctttgcaaatttggtggctgggtaccccagacctgaaagacgcaattaaacagcatcacaaactcgatcctgggattgcatcactagtgctggcctgtcaacgtctcaggaagaatggatacagaaagggacggatccctcttacccagaacagcattttaaatcgacatgtgcaagccatggtggatgacctcaccgaagacacgctcaaaatatttggccttctcacctgtcacttcaacgaagattttggagtgcctctcccccgtcagcttcttcgattcttcgataccccctggaagcttctcggctatgtttgcattggctccaccccagatacacgacaatggtcaaatcggagtcaatcaaaagctttaagagaaagtttatcaacctactagggcttgtggaatattatgtggttagggggaaatgggttctgtgtatctaaaccgtcggattgtgctctcatcgttggaacaatccatcaggagctagctactctactcaacggatagcttttgctaccagattgaatgaaccaaccagaatgctgctctgcgtttgccgcaccacaaatcacacttttacctcaataatggcattctccattctgcttctccattacttgacgtcgtctgatccaaattttgacacatgtgttgaaatcactgttgatgcgtaaactgggcctgcttcatactacctctggtcatgaacgttccacaaaaaagtcatatttcttttcttgcatgcctggatgcacggaattcatatcctgacacagaaataaatgactgaatcaagcaagtacacccgggcggtccaagtttgctgcctaggctgtctccaaaagcttaaagcatgcagatgacaaaagtatcatgcctctatacaaaagcctcgttaatgctgtgggcacgctcaaacccatgtgtcaatccttaaatttcctgtcaatcgagtaaaattccttgagaattaggcaattataaagggcgaaatatcgagcacaaatcttcaagtgaacttatccgagagaccctcggccggaaatcagaaaaagagaactcaatcctccacgctctaataactagatcagagtcgacgacaggctgaaacacctccagcatggctttttcggcgaggacagacccctccgtgtccccggttattgcggtatagccgcgcatgtgatagaatatatcacaacgaataagcacttctcgtttgaccgccagagtaatctgaatgagacgacccatatcagttgccttgggccactcatcttgaagatgatcatacaacaattgccgaaaaagctgacccaattcaccgttcattgcatagtaggtcgaattttccatcatgaccaggtaaatgtaggcaggtgagagtgcgtcggtttgaagttgaccatatctctctctgcatgctgccaggatactgaggcaaggcgtcatagaatgccctcttgggtcgttcaagactatggcttcaggcctgtcagtatcgatgttgaccggatgataagtctacttactatgagagaaaggttgaaagggaagtcggaagtccatcgtaggtggctgaaatggtagcaatgaaaggaagggcccgaactgtgcgagggacttgaagaaccgaagtttggggaacgtactggcataaataagatatcctttctaagcaacacccactctcgggcacttcaagaattcccatgtgcagggaccctgcaccctggtacacgaagtcattgtttggtagttcattatataggttttcattacctcaccgtacgccgcatttgaggggtagcctcaaaatggcgccaaacccatgcaatggataaaattatccctataagtgagatcagcatgcagccattgttagttctcagacactcagtcagttatccaatgaaaggtgcatgtaatcggactccacaatggcactgctaatccgctgcaggcgaacgcagataacacggtatgaaaggccagaggcgttcccgctgcgcaatggcgctaagtctacgccacttttcagtaagacagaaatcccgagtttttgaaaggcttttgtatttgtattaggggaagtgggccgaaatactggtttttataggccaggacggcctcgaagatactgcttttagaagatccatatcacgtccgggaaatactctctccttgttcgtccggattttggatcaaacgtcccgggagcatctcgagcataacataaatactcgaccggtccaccttcccggaaccatgcttcaatatttcaacagaatccattctggatacctgctaccatgtcgttggatgaggacttctgtgtaagacaatcaactctgggtttctctgcagtcatatgctaatttatgaagtttcctttcccaagagccagtctccaagccgccgaaacgactttaattgctcaacaagtgtggcttctgggcacaagagaggtcaaacgagcaataaagcggcagcacaaacccaatgctagaactgcatccctagtattcacctgccaggccctcagaaaatatcgctacttgctcttgggaaaacgcagagccttggccaagaacaatatactgaggaactatgcgcaccgtatggcaagcaagctcactgcacgtgatttggctatgctttcccttctcgcctggcattttgattcgaaaatggtgcctctcccccggaggcttcttatattcttcgccgacccctacaagcaatttgacacagtgtgccgatctatttaccgcagctacacgaaaatgtatgtaccggatacgttggcaaacttcgagggaagcttgaggaaattgttagggctattagaatggcacgtgatcagaggcgacgcagtcttgtatacctagatttgaccctctgttgagaccttgccatatcatactagtcaatgagaaataaaaaatacagcagatatacgctgagcttcaatgaaatcacctgcctcaacaccaacttcaatcactgaatgttataccacacttcccactactttcctttactattctgatctatacctatcaaagtttgttgtgggatttgcgagccaaaattgaggttggactttttctgccgttgcctattgtgctgttagtttgccatctgtcgaggagtttcctctgcaacataattatctcactcaatgggatctatatcttaatcacggccaacagcattgcatcggttacttctctttctgggactgtttcatcatcagcctcaatacatggggcttgtgttgcgtgaaaagactcacgacaattgtcaagtacaaactcaacagagaaacatttgtggtaagagcggcgtcctgagcgtcctggatcatcttccaagggaagatctccttcatttatcgggaatccaatggcaacccggtagcattgaaggaattcgggaaaatctttcttcgtgatcagaccaagacctctgtggatatcgtccccatcattcccttcacctccttctccttcctttcgacaatgacggtagcacgcagttgaatctggaaagagttgaaagcatcgcggacaaataaatttcaagcctgtttttaccagagctcgaagcaagattgcgagccacctttccacgtcagacatcttgaagcaaagtgatagaagcaaccaggaaacagaaggctgacaatttgacaaaagtctactctttataggcgagggccggctcgccagcgcatcttcacagatccaagcacattagtaaatgcacttgccgaatagaactagcagttgggatgcgagatagcactcctgcaaaattttgattaagatattgatacgaaaacgtttggagtgacacagcctcgactgattgtggcctttggtttaattttgttacagcataggtactagtttacagctgctcttacagcctcgcatatcaaatgtccaagtattttactggccatataattcaagttagcttcatgatgacactatctaggacatgaagctgagcggatccagggcagtctaaaagtgtggtcttcaagcaagagcttggatttggaaggctcggttgcaggccgtgttccactaggagatcccatccaatggaagatctgatcatctccgtccgtgaaacccggtagtgttcgaaccacaatttgttaagaacataaggtgattcgccaatcttctcctcactcctcccttcgtgttgaacgatgtaatacgtctccagatcttcgccgtcttctggtatgacttcgtcgagtatgcgcaacggacgagacttcgagtccaaaatttcggcagaaatagattcattggaagggccaagattcatcctcggaggctgatagctcccttctgtatcaatcgttaatggattgcccgttcgatttattaaaggagtatacaaaccttgagagttttcccgtgactgtttccttatcaccccgcagcatcgaaagagcccgaagataccaaaccaaagggtatttagtatatccatatttcgcacaagactttaggtattaagacaataaaagatataaaacttcgtagggaggctttaaaaacagtgaggtactcaattgaaggatccgcgacgtcgagaccgtatagatatgcaagattatatacccctgaatggcaccaatgtcttgtatgttaccccgacccgtcatcattggcaagagtctccagcttcggggctcctgttgtttcctgcatgaggcctatcagagtcccgtaccttggcgccatcttcgtcactgtcagtattgtccagatttagggccggccgaccggcttgcttgtgatatgggactgggacggtaagaaaactgcttttgtgacaggggtcacgcaaagtttgggatagatttattggaagagtgccaggaaagcgtctggaaagcgtccggaaagtgtcagtacagcgtcaagggagtgtcagggggtcatcaggagggcatcaggaaagtgccaggaaaacgtctggaaagcgtccggaaagtgtcagtacagcgtcaagggagtgtcagggggtcatcaggagggcatcaggaaagtgccaggaaaacgtctggaaagcgtccggaaagtgtcagtacagcgtcaagggagtgtcagggggtcatcaggagggcatcaggaaagtgccaggaaaacgtctggaaagcgtccggaaagtgtcagtacagcgtcaagggagtgtcagggggtcatcaggagggcatcaggaaagtgccaggaaaacgtctggaaagcgtccggaaagtgtcagtacagcgtcaagggagtgtcagggggtcatcaggagggcatcaggaaagtgggagagtgtcagaaaaagcaaagttttgtgttcaactgttgtaatcgggcttggcgtattttctacgttggggccatttctggacgccacattcgggtttaccgccatatagtcaaatcacggccttgctctctggagacaccggtgctcttgtcgcattagagcatgctatttcgcatgtattagttcacaggctttctctagtaatcgcgaacaagtggtacttttgttttccccgcggggctgatcaaagccctagactaattatacttgtccgcagccttgggtgctctgataacagtacttccgactgaattatgttaggccaacttatagtcaaagcggactgtgcacgttgggcaaaacatataagacgaacatggtggaaggatcagggtatgagaaaatcgcaaacaatcatcctcccagttgtactcaataccataacgtgtctcctcagccgaacattttttgattatcgggaaggttgggcccctttctattgactttaatgtccaataataacggctctacatgctgcagatgtgcaagtggaatgaattgttgttccgatgcgggcatctcgatcgatatgctttggtcgaaagacataccccgaacgcgacctgtcaaccatctaccgaaaacccgcggcaggagatcaccccaaccataggggatagcctctgccctgcgtgtaattatccatctccagctagtaccatgtccccttaggtgagtgatactgcaggttcttccctattgcttccccgatcacgagcttacaatgtgagtgtctcagttgcgattattggtaccctcagatctgtaccgaagtccgccgttgccgctgaaaattcaattgaaggttgatggggaaccgacggtgcgcaacactggcactatcagaactttgggaagctccatcaaacaagctttcacgaggagacaaggcatgtcggttatgttcacttatctactcattttcagtgggagcattatatgcgaccggatgtgtactggctttgcaatcgcacaggggggttatcgccgctccacgctcattcaataaacgtctttttgtatatttagtctactactgtagatttagtgtagtgcaatttctcaattgccaaacaaggatgttgcaaaagttgcgaattgatacatcatacggtcgtacggcagtgtaagaatttttctaagctcaatgcataaattgttgccttaaagcaacagacaacatgactaagcttcaccgcttgctttggtccgtgcacaacgcccttggttataaatgcccttgagacctgaaaacacctggtttccgagactcttgtcaactatttattccatcacgtgagctatctgaaagtgaaaggccatctctacgcttcatggagaaagtaaatcaggctgtgtccgacgcccttgaaacgcatcgttcaatccgaatcctaggtgacctgcctaccgaaaagctgaatcgtgaagactatctggcctcgactcgtgaattaatcgaaagcctcgtcgattcttggaaagaaaaggcggatttgcggcttttggcggtggaggtttggccacgacacacctactttgcactcgatttcaacaacgacgagtacaactatgacaacgcccacactcaagtggtagtcatacctgtctacctgcttcggctgtccaggaaaagccatacctggacaatctttcggcacaagccccaagactcatcgctcgccaaaagaattgcggacctacatgaaggcaatgggcaggatcccattcccttccttgaagaccacatcaaaggcgtaacacattatgcccctcggaatagcaaaacccctgttgttgcatctgagaaccctacgtgaaaaaatggcccacctccacacaatgatttagtatttgagatcctcattatcgctcgtaatgagataatcaaaagaattgaatattatggagggttgggagaaaaggttcaactattgtcgcatatacgtggatttgcttgctttggcctcgtggatggttaattaagagacccacaaaggaacttggaggattcatatagacgatgtcagtcaaatgaatatcccggcgagaaattctgcggagatggactcaacaagtaacgagaccctatcgtcagctgctgcgcaatttgcaattgtttcattcaatctgtacagatcatgaactgagccttgtacttgtaacaggggatcatctgacaagccattaacacattgaaatgaaagaaaaacgtggaaatttcgatgcacagctgggaagatggggctcggaatgctatcactgcatgtgctcaatgactacagtacacttcccatactatatacatatcgattctaggaaattttagctatggagtgtttggacgagcttactcgtgataaccaatgattgccgcacacttttgcgctagtttgagcaagccgcgctccgagactgaacctactgtaagcagtttacgtctgctcaaaaagaaaatcgtttgttttggggagtgcgtttagttggttatctaggttatagaggtcgatctgtgtaggaaatggagctggccgcgttaaatggaggaaggcgtatgattcatgcaggaaatttaaaactcaatttaacattttgatgcacgggaaggttgtatttaattgagatttgatcacttctgaatgtggggtcctggactactcgaagcgccaatactaaatatcatcatcttgacgggggcctttgtcttctgcctactttcgcgtcgaacggagtattaaacctaagtgccttagctatatggcattatgactacagttaactaactagttaaccggtatggattcgtagatgattcaatttggatggtatcggttagcttgtttgttaggtatatggaaagaaagttaacagcaggcacctgtttgaggaccttctctgtaagccctttgagattttcagcggatatatatatcgttgagagtcatggtgcatactacatccacattacgtacaagatcgcgggtacttgtattggcgacagatataaagcgacagagatgagacaccttctcgaaatagcctcaaagctggatagcgctcatggaatattcgcgacgcacatatagcaaatcaatgctatatagtccatggatcatacaaaagtcccgtagctaacccaggtccacatcattggctaccattgtctgattttagggcctgctacaccactgctcgtggtgtaggcccaggctgatctcatagtttgcttttgcggagagtatttcgcagactgaaaactagatgtacgtaggaagtctattagaccttctgccaccaccacggcggtccttgtgaaactgtgaattagagaaagaggagaacatcagaagagcgtcagtaaagcaaatcttagtaaatgttctaatgctgttatctaatctacataatggcctgagatgacatcaacaaaggcggacggtcctgttagccatcagtcatgatatgtgcctaatgaggtaggtaaaaataagtgtcttagtaaaagagtgttaatatcatatcaggctgccatttacattttatgtcgatgaaccattttgagaccagttattataatgagtcaagtcttaatcggctgcttttggatgcccgaagtttctcatttcgccctcacgtgatatcaccccccacttacctccctccttgaatgttaaagaaaatagttacacaaagcgaacctcctgtttcaataaccaagaacgaacatttgtctcttcctcttaacacccatctggaatatacaacctcccaggtcctattttgatctgtttgttttctttatcgacttcttggaatgtacctttgcttacgaaatgtagttccgcccccccctccttccccccctccttacttcgtcaccctctctgtcacatcgcaaacgaacgttttacgaggctatattttgtcgctttgttatcaatgagtatgacgcagggaagtcaagtcataagatttgacactgcagtggttcccgagaaggaggatttggaagaggtagcgagtaaattggttcggttcgtttcaatcttttccccaagagccaggctgatcgcggacttaggcgtctgaaggactggcgatcaacataaagctagagattgatgaagaaccttctcatccaagatcgttcacaacagccgacgcttcggtccgctgcgtccttgtttgtaagacggggacgatgggggctgtcaggataactggtcctggggccttttataaccttgtcactgggccggaggagactgggtgggaaattgttgcagtgaaggcagagcagacctgcatgtttattggcgatcccaccgtgcgattctttcgcacttcgcataaataatgatactgtctagtgctgcctgtgcttcataacatattgcacgaatgcagcggctagagtttgggaaaactcgatttttgcatccgtctctctagaaaggtagatggatggcagtgtgtcccccaatacgggacagtccatttgcaggtgcttctccggcccttgatattcatgcaagaagttcatcaagtcttttacttggaaatctaaaggaacagatccggggctgggtgtcaagacaggatggtagaggttcccagggactcgaggtgcaaaagaacctgtatagtattcgcttagctcatcaatttcattcggccattctcatatgattactacctgaagctgaaggccaattctgttcggcttgagggggttttggggcgtccgactgggaaagacctaggacagatagtagttgttagaatggtaagatttaatggggagcattgcttgagacctttcgaatgtttctccccgatcttctctagtactgtggttgaaaatttctctttcatgtttgcgattgtccgaggtaaactcaatcgaattatttccctagtagagcgtattgcatacttgccgaaagcgacaacacagaggaccaccaaagcattgccttgtttaggcccagaaagatctctcactttaattaggaattcttggaaactgtctgattgctctgaatgagcagacaagagtgtgaatgcttccgacacctttctagcctcgtcagtcttaaggtatcctcggaggtcgattagagacgaaattttttggagcttttccaaagcgttgtcttcaagcaatcctgcataccgaggccgtcgcctctttgcggcgaggcggggggaagatggcatcaggagagtgccaggagagtgccaggagggtgtcaggagagtgccaggagagtgccaggagagtgtcaggagagtgtcaggagagtgtcattcgcagcgaggcggggggagatggcaccaggagagtgtcagcagaggtcacgaggggctagatatacacttacataagcagcgcccgtgtgtgtaactagttaactagttaattattggccaatctgcggatgataccaatcaatgctcctgggatacaccgtaacttacaaaattgacctgccacccacctggctccggccttagtattgattagagacgagattttacttggttcaagtgtccatttatcaagtcctggccaattaggccatttaacgacgtcagtggggtaccaatatgttcatagggcaagtactatttaagtatatagaatggcagacctctcccagcaatgtccaagaaaaaggcaagcatcatatcgacaaaatggagtttgcccctcacggtacgctctccaaccactacagcattataaagctaaccaaaggacccccagatcctgataaattcttgcttggattgagaaaaatagggaagagcatctatacatgagaatttcaacaaatttagatgatctaagagcaactgctacgtcaaaaggattgtattgactatgactagcgtaaataaccgtttcttattttgctgaatcatcgggttatgctggggatttacgcatttttgggcaacagaggccaagcttctaacgaacaattcttcttccagacgcaaagctgatatgtttgatctaccatgatttcgaggagttctgagatcctgaggatgaccaggatgtgcagtcgaccggtagcaaagcggggtgtacgtggtcgcattaacaaatattcaaacgacctcggggctttgctgaaggaccatcacattcccgctatcccaagagaatctgccagatctctgggcctcatcaaaggcatagccttcagtttaaacgttcccaggagcaaccaactctcttatccctaggatactccggatgagtcctcagataagtgaccggcctctgaaaagtcagaatagccctcagaagcaagattcagtccaagacagtttcatgagtcggtattcattcgatgaagcgtttaagtgaaatcacatggtttataatagataggataggccaaaaggaatataagtttctatggcaccatacggtcatggtaccatacaaaaccgtgcctgtttcacgtatctctgaaattacagatgtcactagtattgtggcttatctgtctcaaagcggtggctgtgcaggctggacgtaaaccctgtaattaccttacatcggtagataatgagcaattgtatcgaatacgagcccagaacatcccttgactaagctgattaccgaaatggccggactacatactgccaagctatcatcaatcgagtctcaagttgtgattgcactttccgcaaatttgattttctaaggtctaatgtatcttcagatataagccacgtatatggaagtaggctgtcgcgcctttcccatatatataccgatttgctgttccaagaatattcgtccttattgtagtatttcaaagaaggtcggttaatcattctggcgggatacaagatgaagtccacctggttttttaatgagctcgttccttctaaagatagtgaagaatttattttgttgatgtggctttggtcgtgcagacccttgaataacatcaattactaagcctgtcatgtgtagtccaacagcatcgacctggcaaacataggcaatataataagataattaaccggtatgttgacttccgtgtctgcaatacgaagctgggaagtcgaggcgcagcgggttgaatgagaccttttcaatagattaacaaaccagaatgccgcatcttcgctccaatagacgagctcttcctgttttgtcgaatatcttgactcttgattaaaggacttcaggtcctacgacaggaagaagcatggtccggtaatttggagccaggggtggcaaaaggatgcctataagtcagggtggaatgatacagactaaagactggcaggcgaagctcttgataatcgtgacatagacgataatatataataattctactgtaccagctcaatagtgatgggaggtgcgggagtttattttcaagtgtattcatagcgttttcaagcgctctctttcgggtgtaacacttcacctggagccttctaggtttccgaaactttggaccatataaatctcacctaaatagagtatcggtttagaccagctttgagggaaagtctcaggtatctcacagccattggtctatatcgggttttgggaattggttgagaaaaacgggcatcatcatcaggccggttgcttggaagggcccattgttggtttaactcaatcgcgggaagcacacgagaactgactttgtcttcgcgtctggggaaatggtaagaagagctcgcgcattaaaattggggcttagtacatgtaataagaccgggggattaagcaaggatctgttttctctcggttatcagtggaccttctgaattcagtcagctacaggagccctgcaaattctcaagctccccttcatacaagactaaaagccacgtacatcctcttcttttaatcgaccaagttcatggacctctggggccatacttttgagccagttggcgaacttaaagtgtaggagggtcaatgttggtatgtctcagtcaactgaagcacacgagacttgaaagcgtccctgcgtctaggaagaagaaaagacagagcttatgtaaacataagtggattttagtaggtaggtggaattcaactgaggggttcaagcacggatcggagggaacagatctcaaggaaggtcatgttacttaatccagtcagccacaggatccatgcgtagtctctcggtaaatacaccatcgtacaagaatggagcccactaaatctttcattcgggcctttgggataatttcccattgtaggcaaaccgtcattgtcctctgcggcatcggaggaatctgcataataatgtcacataaggctttgtttgaatggaacaattgggtagggacaaacttggaataccgacgggttggaaacctatgaacagtctgagttaatccttgaggtgagataaacggcatgtctagtagtggatcagtcagccgaatgtttcaaggttgagagctccgaactttacatacgatgcagagagttctatcgtcgtatatataatatttccaaccgtgtgcaaccgttctgtcatgagtcgcacttttatgcccccaaaggaatcaggacgatctcagtccagttcgtgcatagtaccgttggccgagcgttcagtccattctctgagagtgtcctggaatccaatacctacatctccgttgccccgggttgctgaccgaagatgatattggactttatgactgagcctgctaggttccgattaacctaatactgatgacagcctccctgaagtagtgtcaatgaaagacgatcgatggcatagtactgttgttaaagccttagttgtacttttggtagctttgagtaactttgagtttttctaaagggcatagatgctccgctgcgagcttttgtgtgggtagtaggcccagtaatgttgattggttggaaaatcgtgagcgaaagaaataccaatctggagcacggttagttgatacagaatgagtgaatgaaggctgaactcactgtggtatattcaaaagcagtctttttgtttggctaagtagtttggaggcagagaaatgatgaagacctttgtttttggagcaactgactaaatatatatcccttttgaaatagcatcactttaggcagatatactaagggggaggggccgatatttagagttcctaggattcgaatgacatagctatggggcccttagaacaccttagtaggctcctgggaacgccccgcgggctcctaggagcaccatcggcgtattactgtggattgcttgtccttggcttacagattacttagcaatagcacgaaagccttcggcctgtgcgctcattggcgagagaattagttcatcatcgtcacctgctaaacactgattcctctagctgccttgatacagggaagggttctagatctttaaggaaatctatccaatcgcccttgccctggtagtagtccaaagcccgattaggggatagccgggctggtaagcgaagtattccgaggggtattcctaggagcataggctaaaatggtaaaatggtggtcaattgaatagccccactgtgagattttttacttggataggatcgagaccgctaggacgaacggccaacgttgaccgcgcccgtccttttttgatggccgatttaaatgggaagtgttgcacgtgatgggattagcgtgtcgcattttattgatgtagtttactcaggccgctcatccctacactcagtgagcactcagtgagcaaatcagagtgctcagatgatgatcagtaagtggatcagggtgctcaggggatgatcaggtgatgctcagtgagcagatcacgctgattatgtaatgatccgtgatcaaattggggtactcagggacgtgctcagttttactcagtgatcaaaaagcggcaagaggtgagcactaatacggaaagggaaaggtctcgagttccaggcattatccggtacatatgtaacattgtggaaggtttcagttctgatgatgttgtacgctaacagtagtttcacattcgatctatcaaccgaagaaatccccggaaagccataatagaaggctatatacatggaaaagtttccgcataccaattcaagaaggcatagatgatatctatgaaatgacacccaaaaagacatctaagacaactactattaacctaactagatcatgttgttcttaacagagaccacaaacgcacccgactattcttgtttgtctaatacaacatagatacggcataggcattctacttaaaatctcttgtcttaagtgacaaacggggaccctgcataggtttgaagcttcaaccgcaccccgttccaaatgaggcgctctcactggcaattaaggggtctcaggccggttgttcacatagccgaactaaggtctaagcgacccgtcgaatgggtctatcagatcgtttaatatcgtatccgaaacaggtcgctttaaatatagaccttcaaacggccctatggcaaataatggcaaacttcttgtactcccttgcaaacttcttttttaaaaatcccctgtgacacttcaaccttggaaaaaaagtattctgtaactgtccaactatcatgacgtcgctcatagtagctagcctggctgtactaggtgctctttatatgtggcgtgtcaactctgctatgaaagtagtccccgaagaggcacggaaactatcacctcatcgttggacagtcgaagaaatcaaagcagcttacaaaaagagcctagaaaaccctatcgatgtgactaagagcctgccaccaaaacaatcccgacgatatgtgatcgtaggcggaactggtaagtatacatatagatcgcttttcgatttcatttactgactttccgaactacaggcctagttggtgcttggatagtctcacatcttctcgcacggggcgaagaccacaaggcaattcgcattctagacctaatatctccagagcaggacatcctcaacaaaggcgtgggctggatcaaaaccgatatcaccgacgagctcgcagtaacaacagcattcgaagagccatgggctgccaatgtcaccaaccttgccctaacagtctaccacaccgcagccataatccgaccacaggaccgactcaagagcttcctaccacttagcagcaaagtcaacatcgacggcacacagaatatcctgaacgccgcaagagccgccggcgccacagccttcatctggacatcctcaggctccgtggccctgcaccgaccaaccttctggatcgcgccatgggcgacccagcctaagcgcgtagtccaagtaatcggcgacagcaccaaactgcccggatctcactaccaattcttcagcaactacgccgtaaccaaaaccgaagcagagggcctcgtccgcgcagcagataacccagcaacaaacttccgcaccggctgcatccgccccacgaacggtgtctatggcacaggtggccaagccaacaatgtcatcacgggcctttacctccgcaacggtggcagtccgacctgggctcgcccaatcctgcagagttttgtgcacgctgaaaacgtctcgatcgcacacctcttgtacgaacagcgtctgatccagcagagcgagcctggttcgcagctcccaaatacaggcggccaggcattcaccgttagcgaccccaacccggcgattgcatttaatgatttgtacacactactcacgacgttgtccaaaacgccgctttcattcccggaggtgcagcccttgccgttgttggtgatggcgtattttattgagatgtatactttcttgcagtttagatatctctcttggttgccgaggttgtcaggggatattgggcaacttcagccgtcgctgttttccattatcaatgttcatgtgtttgctgatgattcgcgcgcgaagctggcacctgagatgggtgggttagggtataacccgcctctaaacacactcgaaggtctgtgtcggcgccttgtggattggaatacgaaggccgaaagagagggggttgaggtcatggggaagaagatacggttgggccctgtgcaggtttcgggagatggtgtcaatgtggtcgccccggtgttgtgagggggatttgagtttgttcgatttactcgatctgagtggaggagcagacattgcaccgggttatttttttatgaacatgatatggcgtacaattaaatctgtacttgatcttaggagttcggttgtaaactggaatacgatttggcgtgaaatagaatcatatttggagataaccttagaggaactcattgaatcttctgcaacttccaaaatttggaaaagccggggccgaccagcagtacccgaccatatcacggtctcattcttcctcaatcatcattttgacacaaaagccattgttaaagccggcatggaaattgataaacctccatagatagtcgtagcttgagattgatagtgacctcgggacactctgccgaaacacaccgagaacccagtgtcgagccgtgtgggcgagcagaagtcctcggtgtaaaagcaagagcgatacacataggccactttcgaaggtattcatgggcgaagtaacaaggccatgtaaatctcaagtcgcacacatggcactccaccatgcaagcgttccatcaagcagactgtgcgaccaagaacttgaacccctcagcagcagaaggtcgctagaatgacaagcttctatttctcagaaagatagtcacgaacaagacgagagttctccttagcgagcctgttgctgagccacttgacgcatatggtcaagacgctgcatgcgcaaacgctcagatgccacctcaacatcaagaatcgccccgagacggttcttccacgtctcctccagactgactagctcgccctggatcgcctcctgtgcaatttttctctgcttgttcacctcctcagaagcctgtttcgtctctgccaactccttctcgagagaaccaagtatctcctcaagctgtgaattgccaatcagccaagcgttcttgccatgctcttctagcagagccaggttctcgtggcgcttggacaggtgcgagcttgacgaatatgccttctgcaaagtctggcgccatgcgtctaggtcgggtgcctcggtgtctgatgcgcgagtcggggcatctggtgcttcgtaacgggatagatcgattccgcctgtgagaggtgctccctgcgctttgcgcgagagttcttgttgcatcaattgagagaatttgggttccggcagttcggggatccaaggatgcattatggaggtgtgctctggggatagctctgcgttgatgagctgctgcgctcgcgcttgcgcggacgcagtgggcgccgcgtcgatatcttagaacgttagtgattgggacttcaatgcacatctcttgtccagactggatacatacatggcagcgagtcatgagattcgttgattaacggcattttgaagtggttttcttgtatggatgtcaagatcaagacctgtagattaatctgagaaccacatgaaggcggcgagcccttgagtatcgctgactcagctagtattgaactaataccacgtgaccccatcttttatatgtaccgaggcagaaacgaacaaagtaaacagttctaatttgcgaggcaattagtatatctaacgtgaatgcaccaacagcttcattcgagtcatgagataggttggttgtgtatattgctgcagcaaaaagcagggatgggaccagcatttcccctctaggaatgctctcaacgatgatcctatccagtttggattattttttacgcgaagtacctgagtctcaaggcaagcttccagcccaccggataaaaacaggcaattcaatcttcaccagcacatcttgtgcggggggagtgcagcgaaagtctattcccttttaggtgttcggatgcaatggatgacgatcgcttagacaaatgccacctaccaacctcgggagtacttcatgtacactaatgatcagcttcttcaccaggcttgggagtacttgtgtaatgattttctgcactcgtaggtcgctcgttcgtcttcccactatatcccctaccagtgccctcgtataagaacccatatctccctgggatctcaactcttcaagggctacagttactcagcgcagatttatctattattaattgtgattgtattggaatcccttctccatgatggctcactttcgcatgggcgtgacttttgttggggtgactcttgcgctgctggtgtttttgcagctgagtgcggtattcaagctcgatagccagtcgcagttgccttcgcctagctttatttcaaacttcaaccagtggagaagcagagcaagctcggcggcaactgatatctttgtggtcggagcaggcaaggcagacgtaactgggtatgtttatgcgttaattctgacatatcaatgcactgagttggctaatatgattactaggcccgttgtggagcttgctcttgctggctatgccagtttggaccaactaggcactggtttaaagcagagactgtattctcacgccttcatcttcgcagacccagataagcccgatgacacttttgtttacctggttgtcgatacacttgcgggtgacacggccgtgcgacatggtgtcctggagggtctcactgcactcggtggggagtatgcacggtacggcgaacacaacgttgcaatgacgggaacacattcgcactccgggcctggagcgtggatgaactacctgttacctcagatcccggcactaggcttcgacaagcaaagctatcaagccattgtcgacggcactattctgtcaatcgtccgtgcccatgagaacttggcgccgggtcggctctcttttggatccatcgacttgcaagacactaatacaaaccgcagtcctttttcatatgagcataatcccgaggaagaacgggcgcggtattctgccaatgttgaaaaatcgctctcgctcattcggtttgatcgcgaatccgacaataaaaccgcggctgtcctaacatggttccctgttcatggcacatctatgtacaacaataacactctggtcagtggcgataacaaaggtgttgcggcttacctcttcgagcgcagcgtccacggcgatgcgaggttcaccgaggatgccgtaattggattctctcaggcgagtgttggggacacatcccctaatatcctcggtgcttggtgcgaagacggctctggagagatgtgtcgatatgaagatagcacctgcggtggcaaaaacgaggattgccatggtcgaggtcctttcttccgcgagaacgacaatggagcgaagagctgcttcgagattgggcgccgccagtacttagcagcaaagaagctttacgaagagatggacaccacccctatcaaaattattggaggttcagccgtgaagtctttccatgtgtaccaggacatgaatggctacactttcccatcgcctttcaactctagtacgctaacgacttgctctgcggctctggggtactcgtttgccgctggaactacagacggacctggtgcctttgactttacccagaatgctactggtccagctgaacgcaaccccctgtggcaagttgcgcgtgcagttattcaccagcccagcgaagcgcagcagcagtgtcaaagtccaaaagacgtcctattggatatcggaactcttactgaaccttatgcttgggccgcggacattgtcgacatccaggtcttacgagtgggtcagctgttcctcattatatccaccagcgaagctaccacgatgtctgggcgacgctggaaggaggctattgcgaaagaagcaaaaaaccaacttttaatttccgatcctttagtggtactaggagccccatcaaacagctacgctcactacgtggcgacagaagaagagtacggcgctcagcgctacgagggcgcgtccacactctacggcccaaacacgctggcaggttatgtcaatctgacccttacatatctgccatatttgggaagttcctcaggagttgccaaactcccagccatccaacccggtcccaacccatcaatcaataccaaccgttccttgagcttcattgcaggggttgtgtatgatggagcgcccattggcaaacactttgggaatgtgacttcaaacccggggagtggaccctatggccccggagatattgtgaagacgacctttgtgggcgccaatccccgcaacaatctgcacctcgaatcgacatacgctgcggttgaaagaaaaagcgattctggcacatgggaggttgtgcgcaatgaccgtgattggaatttggtcttcatgtggaagcggaccaatgagattcttggccatagtgaggtgacaattcaatgggagattgaggatgagtattataatgtcgacactacgtcccccctgcaggctgggacctatcggatgcattattatggagactcaaagaatatttttggccaaatctcgccattcgagggcattagtgagactttcacagtgaatacttcataatctgactcattcagaatatgggtgtgtgtggcttggtggcaagttgaatgaatggtgtcaaataatctaattgccaaaatgtacaacccagtaaccaggcctcagtgattatatcttcacttacgcgcccgtacacgtagcaaatgaattagccagacactctcggtctacaaatctatctggtccatatgtcaacatggaatccttgataataataataaagtggtcctgcacctgcagccagccaatcaccacgcgccatcgatcaaggccgggcgcctactgcgacgtctctttgtcgcgcgatctatttctagcataaattcgtctcacaaagaaccccttgcaatagcggttccctctgggaatgatactactgggttgtttcagacttatccatggaaaagctcccaaggatgaacaatgggcggctgacaggaagccctaagccgacttggccagaaaccccagagtgcagatatatcagccagggtcctcgaaggcgagggctttgaaagagaaatctctttcctaataaaatctcaggttgcttcatcttgccccattcttttgtttctcttcatttttgtggtccctagtgatccagtcattctttcatctgcaagccatcaagacgcctcctaggccttgtatgcattcccattaatttcataatattttctttgggtatgcttttttatacatcggattgtctctgttttattcaggtgctctagtatatctctgattgagcacccaattctctttactgtcccactttgtcgaagtcgtgtcccggcgatcacttccaacactctcgtttctaaaccaggatgcttcgctttcagttctttttgttccttcttctgccgtggatggcttcggctggtccgatctctcgctggttgtctcggtcattggaggcatctgcgccgacttatttccccttattgccggatatcgaacggcgtcaagctggcggtatcaccgcaatcacgcctgtggcagcacctacccagcaatcgtttacgtacgacgagccaatagtacttacccttttctaaaccattaagtcaaccacctagctaaccatcacttcaaagccaactacataccatgcgtcatccacaactcataacacaaccaccagccagaggccaactacgcagcagccaactccacagcaaccaaccacgactcatagtacaactactagtcagaagccaactatgcagcaaccaactacaactcaggagccaactacaactcaggagccaactacaactcaggagccaactacaactcaggagccaactacaactcaggagccaactacaactcaggagccaactacaactcaggagccaactacaactcaggagccaactacaactcaggagccaactacaactcaggagccaactacaactcaggagccaactacaactcaggagccaactacaactcaggagccaactacaactcagaagccagtcatcacctctcatgtgtccactaccactcggcgattcatatcctcatccacaaacccgggaatgctgctttcatcaacaataattagcgtattacctgcgtatattccaggctcaacatcctctctcgattctttggtggtgccgagttcagcccaatcttcatcggctacgcttctaggtggaacaaccagcatcaaagctaccacagccacatcgccaatatcgacctctacgaccatacacccaacaatatcaccggtgcccacagtgcccgcaagtcgtagcccaacggtcggagtcattctacctctaggaggagcaagcagcagcaattattccacgttcacaccggtggtatcaacctccgattccatccaaccagcaaaggctacgcaggcatccatacagcttcttacctcagaatccaagccagtggtgaccgtaaccgagcctgtgatcgtatatgtgactcaaggagcgccagctcccttctcgacaagtgtcatccatcacgcacccggtgtcaatagttcatcggtatcattggcaaattcaacgtctgttgaaccaacaactacatctttgacgtttgtgaccatccattccactgcaacatcggttgttcgtgtcactgtttacccaacatcatcaccatcatctgcttcttcgctttcggtctcaaccgggagcacttcgagtgtgaatgcaacgccagttgttcctatgaccggtgactcgacaacactttcgcttccttcatcgtcttcgttgttgtcgtcctcctcgagtgagattgcttctgtggtaacagctcacgtcacttccacgagtgttgttcctctgactgttcacccaactacgtcgttgcctgtatcttcgttgttgccgtcctcaagtgagaatgcttctatagtgacaatccgtgtcacttccacaagtgttgtatcagtgaccgtttactcgacaacatcgccatctgctccattgttgccgtctttaagtgagactgctctgcgtgagactgcccctgttgtgacagctcatgtcacttccacaaaaacaattcgcgtgaccttgtatggtactgctacccgagcagcgaaaactacacatacagcagatcccacatctactatggatgccaatatcgctaccacaacatctaaggcaggccaaggcatacttactgtgaatccggttacgccgtctggctttatcacgatcactgagactgagacggagacaaagactaagacagtgacagatcgcattactgagactgttactgccaccgtcactcggaattaattgtatgattgggaggaaattgattcttttatccttttaattattatgcatggaggcttctttcgctgagtttttttctttcatatttcagactaatttctctaatctatgtcgaaatgttctttatagctacaagaatactaagctttattcaggctaagccataagatgacatgttctgtcctctgtacataccttagcttttgctattgtatatccaaaataaactttagagatcatgtccgatttagacccatatagatcacatcggctgtgttttatcatttctataatataggcgagtctcccaaggtcagacaaacccttgcaatcggatagtactatgagcacaaccacctctacctcgccttccacctaaccctcccaacccagatagcccagtcccgcacatcctccctctcacatatcctctcaacagtaaaccactccctagccagctcctcattactcgccatgcgatgcacgaaactatgacaagcgcgacaaagccacgccacactattcaacatccactcatcatgccaccccctcttaacgaccttcgcatgcaccccgcggggaatcaaatggtgatatgagagcgggatccagtcgcgctcgcagatctcgcacgcgtccgcgcgcgtgctcgcccatgccagcgggccagtcgtcacgctcgatgtgtactccgccagcacgggcgcgaggaagtccagcaggtctgccgcgttgggaatgatgccatagacgactaacgagtcggttacgctaacagggattagagagaatagggtttcgagcgtggcgcgtgggaggggcgtgtcggtgtcttgggggatgtagagggttgatagggttggatcgtgttggatggctgcgtagcttagggtttggagggcggttgggaaggtggtgaaggtttctgaggctaggaacttaggttgttagctttgagtcctgtcagttgttggctgtgatgtgtaggtttgttgggcctgattgctttgcgctaggttggacttggccgggtacaatgtacatcaacaaattcggcgagctcttccgggtctgcttctccctgttgagaggttgtcgctgttattacgtctttgcgcccggtgcgcttgccctttggcttccgtcgcgctggcttctgtttttcctctgaacgagccacgatggcattagacagacattcgcggaacacagcataattctcattggaagtcattgagactagccttgacctatagctcggtccggaggggatgtcgggcaagtctgttttgccccgcggaaaattgacatcattcttcagtgaccttcttcaaggctccgaacttcactgcctttgacctcgagatttatgaaacatcatgacagctaatacagccaatacagttgtcgcttttgatttatatggcactttactctcaactcaatcgatcgccaaacacttagagaaacattatgacaatgccaaggcgcagtctatctccgcgctctggaggcggtatcaactggagtacacatggagattgaacagcatgggcaagcaacacttccaggcttggcgctcaaattattgacgatcaaaaggccgctatgaagacttctcagtcatcactcgtaactccctactgcacgcgctagccgataacaacgagcagctgagcaacgacaacatcgaacgcttgatgcaagcttacgatagtctctctacattttctgacgtgaatccagctttgatcaacatcgctgcagacccaaccatccaagctgttatattctccaatgggacgaaaaccatggtaaccaactcggtgttgcgatcaaaggacctttcgccgcacgcgagtgtctgtcaagaaatcgtcaccgtagacgaagtccagcaatataagccatcaaaggcaacctacgagcacctagcgaagcagataggccaagatccgtcgcagatgagcaaactttggctggttagcggcaaccctttcgacattgtcggggcgcgcgctacaggcatgcaggctatatgggttgatcgtgttggtacaggatggaaggacgccatggctccagatctacaaccaacggccattgtacacagtctggagcaaattgtgaacgagattcatagccgtcgcctttaagctagggcatagagaacaaacttcgaacggaggtatctagacactagacaccaagagaagttgtgaaaggaatgtacagctgaatatatttccaaacgctccacacttgagtagaagagtttggggtaagccagcagatttgctctttcctcccatttcccctccagaacagtgattgtaacaaaggttcagagtgaatagggaggaattcagtttatgtgaagaagaaaaggaagagggcgctcggcgaaaaatttctcgatcaaatagtacgagcttagtcatccgactgatatcccatgggtcacgtgtgagcttcgcttatcgataaggtgcctgtccagatgcttttgaactcgtcgttggcaaggaatatttgaaccggtgaaactgcaagccatgtcgcgactcctggatcccagccgagctgcttggctttaccctcttcgggtatgtcaatttggggcctcctacgcttcaagactaacctgaacagggaatctactattttgcgtcgaatcgattcctatggcctttcttcaaggcccgccttgtcccaatcgtcctcctttcttccttcatatacttcatcctatttttcttcacctacctgccccaggttgccttccttgccatctttcagggcagctcggcatgggtgagcggcgcattcctggtgcttggtgaaggagctgcaattgttgccgccctcttcgaggcattcttcgtcgatgagaccctagtggatatattcgatgcagtgttagtaaatgagggtcaggaggagcttgttactacctcgcgggtcatttaccccgagcctggcaaccccgccaagcgtctaggcacgccgaccaccagtgccgtgtattctccattttcgttgcggcagatcgccgagtttataatcctgcttccgcttatatttattccggtggccggcacccctatgttcctaattttgactggctatcgtgccggtcccctccatcactggcgttacttccacctgctggacatgtccaagcagcagagaaaggaaaccatcagtcggcgtcagctgcagtacactacgtgggtcatgtccatttcctctgttgatatgagatctaacgcactctagctttgggacgatggctctgatccttcagctgattcctcctttctctatgctatttctgatgaccacggctgctgggtcggcactttgggcgacggatatcgaacgcaagcgacgagctatcaaccaacagtccagtcgactgggcgaacaatacagtgacgatattatgccttgacctgtgaacgatatgtctcgagattactgcaaatacatctaattttccttttctggttcctgattcagctttgatctatgccactagggaggagcaatgaatattgttaaatccaatctaattccctctccgtgattcaattcgaaacggcggacttgggaattgctttttcgagcgctgtcatggtaactccctaatgccttccgccataaaaaagacacgtccgcgccactgttcctcaccttctctcacttttccattctccctgcttctctgtcttatactcatcgctgtgcctttgcattttcgcccgctcaatcggactcaccgactacgctaccaagctggagacccacctcaaggctttgatagattgaatttacatacgcaggcgtcgaggcataagcagtagttgcaaatagttatcaatcccataactaattaaataaataataatataactaactaaccagatgtttaacatacaacataaatcggtgacgggttttcccgactaggtctagcggcgctctgcgtaggtggagccccggggagcatcggcctcaggatccatgtgtactcgactaggaaaacgggaaaacggccgtttgtcggcaatttcccaaaacctcaataagttgtgattagggagatctcttctaccctaatgttgcatcagagtggtctttcctcactccttatcttgatatccacggtaatatgattgacaggatggacctatccaaccaaccgctgccaggggggctgccctcggagatctggcttcacattttcaccatggtatgtcttgtaaaacgcaaagaaatcaataaaatgccaagctcacatcacaattcagctggattgcccctcccagtgaacaactcccgtggaaaagttatatccatcccactcatttgtgtgtgcatgtgaaaaacattgtcgtggtgcactcctatggtgtttctccttaccagtttgacttctgtgatgagtttgtggaattcctatcatacctatttagggtggcagacaatcttcagaactttcagtatgttgctttctctttcgttttgacacagcgctgatttcctttagctggtggcatgagagatatatgccaggggaaattttgtaccatctttacaaatactgtccccaagcaagtgtccacattgctagctcgaaagttgcactatgtgagaaaatcaacaaggatgattcatcggcacctcaactctcctgtatccgttcaatcgaatcagaatggtacaccggagagtatgatagaccaatcaggccaagttcagctgcaagctatccagctgaattgaaagatattatttatcgaagtaagaacctcaaaaacctcacactggttagcacgtcaaattggaggccgctttccaggacgccgcgtcatgatggcgacatctcacctcatgtcaagccgagggaacttgaagcccaaaggaatcagaggggtctcattacgttggaagaagggaatattcttcctcaagtcaaaaacattcagttccaaagtatgagatttggacctctccagagcacgttatgggccacacaatacaatggcataccatcaaacatttatccttgatcgccgtcgattggattcacttgttgcccaagatcactgctcctagctgctttcatgcgctagagactctagagataagcatttattataaaacagaccgccctgaatctatcgaacgggtggagcaattccacgactttctgaaagagcttctacctttgaaaatgtttatcgggtatggatttccacagaaaactctgggggtattggcgaaatatcacgccaaatcccttcatcacctacggtttcgatcttcattgagactcgatcttgacgggggaaaatctcctgccagcattcacaatctcgtcaatctagccgatcaactcccgaacttactatctctcggtattaatctggactggatgcccgacgatgaaatggtgagtatccccgccattattttaccattaatggaggcttcccagtcgctaatattactatagccatacgatcttctcgtcaacattgttcaacacactcatcttcaacatttagaactcaacataccaggtcttggttgttatcactctgagtggccttaccccaaccttaacgaaatgacttgtcgggcccttatcgagttctttgacgagacgtccctaaaccttctctcattacatttcgtcattggcgactgatttccttttgggcctccaccaattctacaatggtatcaggcagcgttcctggtcggcgagcgagactatgcgggtcatatgcgcttcagcaatgttcggcagtacaggcaacttcggaaaatgatacgcgaggggagttttgttccacgagtcccatcgcgccagctaaggggggactggcccactgatctacggcaggatatagaagaccgaattagcgacctcttttgtggaaagatgccgagaaaagaatcttggtagcggatatctgtcacatacatcctcactgttatcccgcgcttttcagagacaatatgcaatatcttgatgtcgaattgagatctttacctctttaccagggcacatattctaggaatgtcttatttcatagatgaattttcgatccctataaatacattatacggtcgctcacccatacttcaaggctacatttgcttcattgttttagttccttaataatcttcctacttctcctaatctatgaagtggtaggaagagcaggaacgggccttatagttcataataccacatcatcgactactcacatgtaggagatatccatggatatgcatctccattcaaagcatccgtttgatatattcatctacagtgcagatataactctcacattcttcactttgatgtaggtttaacatacgcggcatagcaaaatgtacctgattcgagagtaatgaccatcatggaacattgattatttggatttgggtctaaccaaacaatagagtagtgtacacgaaggcaaccaccacgacttcgacgaccgattcatgcactacactaacgggtgaaaatgcagctgtttctggtgtcaaaagcggtctttttcggtgtccttttcacaggtcctcatcttctcgttgcaaaaaaggtctggaatacgagtagcacgtgactgcaccacgatccgagacgtgttttcttcttttgggaatgtattcacattataatccttggactcatctcttgagagcaaaacatcataagtacttttttcatagttaccaaggcagagagttcatataccctagactttccaggccttggacaattcggagacaattcggaagtgtgaccccgtacttcgaacctttgcccgagattatcagagcctctagagcttcagctttaaagttcctggctcattccgactttcgggacggatttcggcttatagtcaaacctggagtctggatgtttggactgtctttgggccgattaaacatgacctgactggcgtggtcatcccggcaatttgctcatcgatggaccttaaaacaaggctgcgcaaggcctgcgatgcctgcagtattcggaaagtgaaggtatggttcttttgtcatgttatgcgggggaatactaatttctatgtaagtgtgatacggctgggccaccttgtcggtcgtgcgctagcttggatattccctgcacctatgaaagaccaagcaggcgccgcgggccccctaaccgccatgcagaagcgtttaagaaacaaaggcgggaacccgaagatgcagtgtcgctgagcccggcaaactatccgtcggcgacgactcccctggcggcgccattcaccaattctcaatctgcatcgctccccttatcggtagaatcgatttgttctttgcacacgatgcagatgttgctcgatgacttttttacttacattcatcctttggtcccaattccccacgagccttcttttcgagcagcctttgagcgccgagaagatgtaaccaaccacacatttttggcgcttttggcgtcaatgattggacttttagtagcttccttccctcgacgacctaaactccgactcaacaccgaagccgaacgcaccgctttccccaattctatagctctagtaaagcggtgccttgacgttgcgattcaagcccgcgggaccggatatcttgatcgcaacgccacagtctacgatgcagcaatcagctattttctcggtgtatgtgctgggtatatttacaacatgcgtcgatgccgtgtgtacctgtcggaatgccgagccatgctccaagtgtatgatctataccggtctccgaccaccaccaaccgcccgtcctcgacattaggacccctcagcccactatcgtcggccttactaatggtgcaggatccaccagcacataatttcacggaaagccaaggcgtcgacctcatcacccaagagctcggccggcgtctgttctatgtcaccttagtcggatatcagacattgcatcagatgggctcttcagatatcaaggttcatgttcctccagagacaccaacggaccgttacccaccactcccgctggagatcgatgatgaatttttattctcaacacatgttgagccgcagccgtccgaccgagtctcacggctagtcgggttcaatgcaaatgttcgcgtctacagctcatataccgccctgctagcttgggaaatagcgtttggcaacggtcaaatctttgattgggagcaccagcgcaactgtatttgggactgtctcaagaaagcaaaatctgcactaatcaatgttcctgctgagttgtctctccaccatccgaagcacacatccccgacatgtttgtcaggtctcggcggcgatgacacaatcttcagctactctaatgatcatatccaccaagaacgacgtgctatacagtatgagatccagaaagccaatatctacgctagtcagttatgcaccaggtcctatctggtcgagaagtactggaaccttttcgagacattttcaaagtatggaaagtcaccgaaattcatgacaccgggcagcaccacgccagatatcaaaaccgaaggaagacccaattcagtaccgagtgcgagtgcgactcccactggtacagccccatcagaaaccaacactcaagctcaacatgcacaaacagactttattagtcgcatgatggctgaagagcgcaaagtggtcatcaaagaccttttcgtgctattacgaacagtgaacgaagtgaatatggagccgaacggcgcaagcattgtatgtcccgtttactctaaacatcactatctatcattgtatcacgctaacaaaaggagtctgattacagaccaataaaatccgccaagtagcatccaccctcctcggcctttcacaccgaccgaataaatccaacactgaaatccccaaacccacaaccgctgcggcaccatcaccatcaccaacgaccgtgcctccaggcctccacgtcctcaccgacgcagaggcggagacctaccttcacgcatttatcgagacgcttgtccgactggaatgccattcttccatgggcgatgcagctagtcctgccgacggcgtcaatccacagatgaacggtcgcgctatgagctatctgagtgattatgagcgcgaccaagaagaattgagccagtgggcgagtttgaaggagtatcagcagaagtttgcggaggctggtggtgttttgtatcagctgtagcgtttccagcatcttcttggtggtctttcttcctcaatattcgtgcattactttgggataggaaggtcagggttctggcgttggatcacgaatggatattatatcattcgcagatatggatatatcaatggacttaggtttggtatacttcaaatatagcgtctctcatctcgagacagctaagtattcataattctatttcggtcccgcgcgagtctagcaaagcggcgactatggtccaagcatgttaaattcctacgttgtcaatggggccgcatgagcagccgactaattttgttgagaaaagcaatgaatggcattccggtcattcggccatgatatttgagtacttacacatgcgctgcaacagcaacaccttccctaattacattgattgtatgctttttcttccggtccctatagatagggatgcaacaacgcccagaccatgcaagtcaaccaaccatgtcgagagaaaaggaaaatataatacaaaatttgaatcaagatcataggggaatggagagtgtgagatgatacaaacaaataatacaagcggtcatcacgaccgcacagatttttgagatcacggagcgagtatctcacagatagcgcttctcggagatctcttcgtagcactggacatggtcaccaggtgcgaaatctgtccaattttcgaaagcgataccacattctgtgtctttgcgcatttcgatgacgtctttcttgacgttcttgagggaaaccattgcgcctgttgtggaaagttagttttgatccggaatattcgtgttgagctgcttgtgatatgcttaccatcgtagactatctcctccccgcggagcaccctgaccttgcgagtcttgttgatcagaccgttacgcacacgacttccagcaatagctgtcttttcacgtcccttgacagtgatctcgaacacctgctggatctcggcttctccggtcacacgcatagtgaccgttggaggtagcttttcactgagaatggccttgacgtcatcaatcagtttataaataatgttgtgatccagaatctcgacgttctcagcctctgccatacgcatgatattaggatcaatggcctggttgaatgagatgatcttgcccttcgcactgccagcatgttcgatatcgaattcactgacagggccaacacccgaacggatgatattggcaaagacttcgttggtaccgactgctgcaacggagttcaaaaccgcttctaccgaaccgtccacatcgcccttcaggatgaaattgaccgacttagggccggtaggttcgacatcctgtgttgtttcttcctcttctcgctctcgcctgcgcttctcgacaagttcacgacgagcctcgtttatggcaatcatatcgacacccatcttctgggtatcagatctctccaagcggtaatctacaacgtccttggctttctgctcagttggtgcctgtaggagctcggtgccagcacctggctgctctctccaaccatcgatttcgacgggcattccaggcgtggcttcactgatagtcacaccggcttgattgcggagggtgcggacacgagcccacgcggtaccggcaataatgatatcgcctggccgcagggttccacgtcgaatcagagcagatgctacacggccataactctttgtagaggcctcgatgatccagccttccacgttacagacggtggatgcgcggtggtcgagcatttcagagagcgcgacgatggcttcttccagttcgagcattccctgtccggttttgccgctgacaccgatcgcctgaacgtcacctccataatcttccacatggacaccatgaatagaaaggtcagccttgactcgatcagggttgttgccctccttgtcaattttgctgatggcgacaatgacgggaaccttggcttgggtggcgtgtttgatggcttcgatagtttgtggtttgacactgtcgtccgcggcaacaacaagcaccacaatatcggtcacgtcggcaccccggcgacgcatttccaaaaatgcagaatggccgggggtatcaaggaaggtgatggcttttccggaaggcatcgttacggagaatgcgccaatatgttgcgtgataccaccatgttcagacgctgctacagatgacttgcgcagccaatccaaaatcgtagttttgccgtgatcaacgtgacccataatagtgaccacaggtggtcgagttggcagatttgatgtgtcctcaagttcaggcgcagcgtgtagatctgccttgccgctgtcgaagatagcctcgtagttgaactcggctgccaccaatccggcagtttctgcatcgagaacatctctgtacgtgatttcctcgaagcccatctcctccattcgctgcacaaattgcgctggccgcacgccaatgacatcggccaagttgctaacactgatgaattcaggtaagtagagaggagccggtgctgccagcgcggcggccttctttgcagccctttgggcgtccttttctttctgctggcgtcttcgctctctgcggaggcgctcgcgatcttccgagtcaaagtcggccccatcagactcactctcacgtcccttgcgtccatcacggcgcttcataggctttggcggtggcggctgttcttgcgcctctagcttctctagctgctccagtgcagacatatcccaagtccattggttcttcttgaaattgtctgcttcctcctttgtttgaggtcggtcaaattcctctgaatcgcgttctgtgtttcttgttgtattcagcttaacgtcttgttccaactcagacaagactgagtcccctaattgctggaactttctagtatactcagggggggatctggactcttgaaattgtgaacgtccgggagaatcgctatactctctagttattcgggaccttggctgggcgtcggcaggtcgagaggttttgcagaatggacacacttgctttgtggcaaaaacatgtttcatgcactgagggcagttccagtcgtcgtgggccattggatggtccctagttgctttgttctgaaattggccctgggatctgttttgtgtcttctcaggagcaaacgggttctcttcttcattcgccgctttcgttgctcggatagacgggttcctctcctgattgcgcgaggtccccttgggccacctcatgtagccacctccattctctttttcaaacggggctctctctggagtgaatgggttcctctcctgatcccgtgaagttcctttgggccacttcatgtagctacctggattttcttctttaaacggattcttctcttgagtggacgggttcgtcccctgattccgtggggtttctcttgaccacttcatgtggctacctggagtttcttctccaaaaggattattctcctgggtggacgagttcatctcttgattccttggtgtctctcttgatcctatcatgtaggcatcttgattatcccgagggcccacgcgccgcacgttcggtttcctctgctggtttgattgcgctgagttccattgctgatttgactgttcccgcctccgttgtggtagtgtaggcgcgggtgcaggtcctggcggcggcggttgactattggcgacaagggttcggcgcagcgcttgttctgcgaaactcaagcccgccgatggcgtagtttgtttcgggccccatcggctgccaaacttgggcttttccggcgctggatttgagggactactatcataattcccattcgatgcatccgatgagttcaaacatgtcgccgataaccgtaaggtccgtcgaactgtgagagctgttaaagtaggcgttcggtaggctgaattcgaccattcagcccgacgcgatagctgtaggtttagttagatactgccgcaacacttaagagctgcgaacttaccctgcagactggccgacgatgcatcattcactagtctatccacatctggatccgtcaacttttttccctttccagaagttcggaatgagcttatgtcattgattaggtcagctggtgggtatcaacccgcttatgtaacatgtccgccggtaaagtcacatgcctcggcattattatccaatcagaggtcagatggcgccattgcgataagcgggctggatataaagtctggagtctccgcattgtgtgcctgtctatacttttagtcgttgcggttcagttgtttgagacatggagactgaggtaattgacagtatcgataagggcggcggtggtgcccttcgcaccatcaaggatttggccgcaggcgcggcgggtggaatagcccaggttctcctcggtatgtgtacaccgtactttctttgaattccgggggaaagccaggggcgtcatgagatgagaatcttgccatgactgtgtctcgcggggaatgatccagacatgcaaaaccaaagcaattgctaacaagaaactaggtcaaccctttggtatgtgatctgcctaaagcacatcttaggagacattgcttaacaatccggcagatatcgtcaaggtgcgcctgcaaactaccactcaatacaagagtgcgctagagtgcgcaacccagatcttcaagaaggaaggtcccacggccttctataagggcacactgaccccgcttatcggcatcggtgcttgcgtgagttgccccgcggccaaggtccactatagacaaatcctctaaccaactcaggtgtctgttcaattcggcgcctatcacgaagctcgtcgtcgcttggaagagctgaacaagaagaaatacgccgactcaaccctttcatacactcagtactacctggccggttcattcgccggtctcaccaactccgtgttgtcaggcccaattgagcatgtgcgtattcgcctgcaggcacagcctcacggtgctggtcgtctgtactcaggccctatcgactgcgtgagcaagctggccgcacagggcggtgccctccgcggtatttaccgcggccaggtggttactctcctccgtgaggctcaggcttacggtgcctggttcatggcctttgagttcatgatgaaccaggacgccaagcgtaacaatgtcaagcgtgaggatctctctaagggaaagattgccatttacggtggcctggctggtgaactcctctggctctccagctacccgttcgatgttatcaagagtaagatgcagaccgatggattcggcgcgcagcaaaagttcagcaacatgcgcgactgcttcaagaagacttatgccattgagggtctcggtggtttctggaagggtattggccctactctgctgagagctatgcctgtttctgctggaacattcctgacgtatgtttgccctttctttgctcgctcatgatgcttgtgtttctaatattgccgctaacccttcgccccagtgtcgagttggccatgcaggcactcggttaaaggccccgtaagggtatgttctaatgatgaaagttgacgcatttggtttttggtcggtttcacttgaattctttgatatccagggcttgttcaatatcctacggttggatggaggtccactacaaaagtgaatggcatttcaaagcttatagagatctatatccatgtcttacattgagcgattgtgagattatatatacctatacagtgtttccaatatacagaatttggttttctatatttctagtgtgaagtccctaaaggcttctccccaagaaattcctgctaagcagtagggaaatgacccaagttcaagctaggaaagtcctctctaacatagaccacagaagatctgcctctgtatcgaacaattggacatttagcctaggcaaggcccattgcatatttcagcctggtcagatatatatccaagtcaaccctacgagtctccggctttggtcatctacaccccccatgtattccgtgggactcgtcaaatggctatgagggccacgacttcaggaacacccacgagaaagcccggtttgatatttgttgctgacctacatggacttccacaacatggtaatgttgatgtccctgtggtaggtgaggcagcaggtgctacgggaccctctgcctacgctgtctcatcggggctacggtgagatggtggttgaaggggatggggagaagagaagaagaagaagaagaggaggaagggtgggaggggtccttttatacccctaacaacgcgtaccttcccaaatggacactctccaacgcaccttcctggaatcacaaatgtcacatgtcttctaactttggaagccaatgacaatacgccatacctgcccacacctgggcaggattgtttgttcggtgatggttacatcactttatgaccttcatgtccatttgttgtatagtatagcacttcgaagttcggtggttcggtggtggatactctatgagtccttgaagtcacaaaacaatatgtcggcacgtgggctatcttgaataaattgaaagcagcaagcagtggagatacgtattaatacaggttcggtcttcgtctcatggctcttgattgcatatatatctgatggagagaagaagaaggttgatatttgttcaacgcctgaggcatccatgcctaggcaggcaaaccctgatgtcatttgtccaggtcatcgtcaacttttcttgctttaaccttcccaagtacaacaactatgctccgtggtgatatttccatgtgccggtgaattgttgtgtatttcaaaatatatcacttcatttccctctactcaaatctcgccctatgcttacgacgatgtccaccgcgcgacctgtcaccctcctctcagctgttctcctcatataccctgcgacattattactcgggtctttgttttcagcaatctctccaacagcgcgacactccagagatttgtccgactctttcccacagcctgcaggccctctggctccatccctggcttcagacctatacctatccgacggccccgttaactacttcgcccgaaagaataatatcttcaatgtctacttcgtaaagattggatggctatggaccacagccgcctttgcctcgcttctcatattccaacccctttatgcttcgtctcaccgggaatccctctcacagcaagaagcacgtttccgacgcaccctccaagccattctacgatacacactcgcgacaacagtatggtatcttgcaacgcaatggttcttcgggccgccagtcattgatcgcagtttcgtggccacgggcggcaaatgcgaacaggctatcgaggaagtcgggaggatagccgctgggcagagtagcgcaacgggcctagacgcgctattcacagcaacgacgtgcaaagccgccggtggcgcatggaggggtggacatgatatcagtggacatgtgttgatgctggttctggccacaggagtcctggcatttgaggctgtcggggccagcgcatgcgcacccgcatgtttgtcgcgttctgatcctggggacgcgggacgtgaacgcaaggccagtgatgctgatagtactccaataatcgattcaattgagactgccgggttcgcaagaacgtggtcgctccgtcttgtttggggtattattgccatgggctggtggatgctcctcatgaccgcgatttggtttcacacttggctagaaagggtatgtgcattcttcggcaaaatcctacacgataaaattctaaatttgctaatgattcctctagtggtctggtctgttgattggtttgggagctgtgtatgccatctatattcttccaagacggatagcaccattggggaacgtaattggacatccgggagtatagacgtctgttttgcctgcgagattaaattctcagcagctgcgagtatatcgaatgataatgatagattgcattgattctgggcatcgagaaatgctcaagtcgtctaccgtcagacctgtattgtacatagagtaataagcctggcatatatatagacatagctagttacgaagtccttttcttcaaaatatcttcgatatccttctacatatccaccagaattctgacctaaggatggaaatgttgtagtactgctagggtgttggtgttggttcctttcccaggtatccagctcgaaatgctgggattgaggagcgtgtcaaaataccgaactcatcataggtgacaggtgacatttgagagatcatttgacttacctcctggaatcaatgctgccgcatacatcacccgcgtgataggcctcaagtcctctggtgtcagatcatcggttatggatagtttcatgtatggatcccaagcagcaatgatggcatcggagtagcatttcaaatcaccagagcattcttttttcgcattcacccgtggctggcattggatgcctatgcaggtcccaaactcacgaaaggccagccgaaatcggatattgcgctccaaatactgattgatttcgaacagattgtctgaaagaacccctagtcagcttgattcttattgtcatgtcctttcgtggatatcgacggaaagatgactgacatatttgatcgaagcatttccccgccaggtcagcagcccagctctctcgctcggaaaaccaatgtgccgtccataaagtcataccaagatccaggggatcacttgatacaaagtgctctccttttcgctccatcgtgcgtctgtagtcgtcgatctcctcggtcaacaccgcaccatcacctgcttctatggctgtatcttgcaggagtcggaaaataacaaagccatcaatcggatcaagattaccttctgacttgaccattggctctgacaagtccatgctcattttccatatcattcttggtcgagctgccgcgcgatcaacaaagaactttgggtgtatcgctttcgccagctctatggcttgtctgttgtacttcaaatctcccgatgctttggccatccggttcaatgcgaacatccaaaccgttaggtaatgatgatattgcccatcgccatctggaccgtgagcatctgtcttgccgatcctcaatccaccgcttagcgggttctcgtctgttgctcctcgcagtcttgagtggccatctcgatttctacctaggatgtcatggacagtctcaatcaaacgaccagccaacaccagataacggtcgtcaccaacaatgtcattgtcacttcgcttatactggctgtgcattgtgagaaagttgataaccccgaaggcatctgtccataggtatcgcccccgatgaccacctgatcttggtggtggagtccaggattttggatcttcgatgctgctaaaacttccgtaaagagattccatggcttgtccaaagcggtctatgcgcggtgacgggctgctgattggcagagccattctcgaggtatgggtatgtgccttcgaaatgggatgggcatatgcgtagctgcggggatgaataattgcttgtctagcagtgtgctgactggaaaagagcaacttgaaccactgcatttgttatcgattctcattctcagatgtcatttgttccactatcgccggaattagagcattttggttcgccatcgacgatgaagtcatgaagtcatgatgattgtttaacagccgggatgtgaataattcgctgggaaaaatcccgcaaaacaaagggcatatgttatattgatgaaagaagaatcgacatgcggtgggttatgtccggcatttcagtactcgacatattcatttattccgcgtaaagatatccccaaccacagcctaaccgttcatgcgcttggcatctatactccgaactacgaaaaggatgcctcaattacaagagcttttcaattcagcagtgcagcccctgcctgcaatcgaggataagagttttgcatcacacttcgatacctttgcgggtagccaagtgattctgctaggcgatggcagccatggaacatctgagttctattctgcacgtgcagagatcacaaagcgactcattgaacgacatggctacaccatggtcgcggtcgaagcagactggccagatgcagaggccatcgaccgatatgtgcgcttacgtccaggccccaaagcgcaaattggagggagcgcgaaaggatacgaagcattcactcgctttcctacctggatgtggaagaattatgagatgcaagggctagttgaatggatgcgtaatcgaaacaaggatctcccaccagaacaaagagccgggttctacgggttggacctgtacagcatgggtgcctcgatcgccgctgtgatcaactatttagaccaggtggacccacaggcaagcaagctagcacgccagcggtatgggtgcttggagccttgggtggatgatcccacttcatatggtctggcatcccttcagggattggaagactgcgaaggtccagtgatgaaaatactcacagaccttttggcccgaaggcttgagtacatcggcttgtgggatggcgatgaaaaccacagcgccgaacagaatgctcacctagttcgtgatgcggaacagtattacagggcgatgtactacagctcagcaagctcatggaacctgcgcgacatgcacatgttcgaaaccttagtccgcctgttaaagtacaacgagggagagaaagctattgtgtgggcccataattcgcatgtcggagatgcgcgctatacaagcatgggatttcgccgcaaggagctcaatatcgggcaactatgccgtgagcgactaggacgcgagaatgtgaccattcttggatgcggaacccacactggcacagttgccgcggcccatgagtgggacgatgatatggaggtcatgtccgtccgtccctcccgagaggatagttgggagattgtggcccatgatactggtgtgccacgattcgtgctcgacctgcgtcaggatcgcatagacccctctctgcgctcagctatcgctgctgagcaacgcctgcagcgcttcattggtgtcatctaccgccctgataccgagcgtgcctcccactactcgcaaaccttcctccacaagcagtttgatgcttatatctggtttgataggaccaaggctgttcaacccttggaagtaatgcagccccagacgccgcttggaaagagcgaaacctatccatttggactctagtactagtatatttctacctcaaaagcaacgagttattatcagtatctctcatttttctctcattgtagacggattaagttcttcctgcatataagtttcgcacttccggtgccgtttcctgcatatgcagcacaagtgcatgaatcacatcgcttagcacattgcaaagaccaggttcggagatttcccaaaaaggatgagaactgcaaaccttggaagtacgtacatacaaactttgtatagccgaaaacggacaaccgggccggatcaaatcaatcagatcaatcagataaggcggatcaaccataacgagtgggtcggtggatgtaaatcttgtgcttggtccctttaaaaaatccctgactggctctctcattggcctcaaggatcgcctgacctaccgacctcgggaatacatgctccatacaagaaacgaaatttcgatcatcggtggccagtacattttctgactagcttgtgtttagctcgtctccctagccaatctactccgtgctctaggtattttcccggtatggtgaaattttcgtttacacctactgtgctgcagtataaaaccggtgtcgaggaaactagcccccgaagccgtacgttttctttagttttcagactttgctgtcataagttcaggctcttcccatgactcaggatcccatttttcaaatttcaacggaggatttcaagtttgaaccgagattttaggtctgactgtcgaaaccatgggtgtgagaaagcgcttcgtcaacccatttgcacgcacggcatcctctgaggaggtacaaacgactgatgcccctgacctaaaggctcacgccgactccaaatttgccttggaaaacttggatcagaccgatcgggcctcgtcggacgtcgaagttgttgatcaaaaagcgcaggctggtactcagaaagcccaggcaagcacccaagcctggacaaagaacacattgattgcagcctatgttctgtaagttccatctggtgccgaccccccaaggaacttctttagctaacaaattaaagcgtctgggtcgtcaactttttagaatacttcagttctggactgctcagttccctatccccatatatctatagcggtttcgagctacactccttaacgggtctcacttctgtcatcgcttcgttgatctccgctctggtgaagttcccctacgcgaaacttatggatgtttggggtcgacctcaggcctttgcagtcggtgttggatctctgactctcggactagtcatgatggcagcctgcaagaatgtacaaacatattgtgctgctcaggtgttctaccagactgggttcagcatgatcgatttctctatgaccatcttcattgccgatactacggctttgaagaaccgggctttctggattgcttatgccgcttctccatatctcatcacgccttgggtctacggttacgctgcgaaccagatcgttgccccggacggcatcgggtatcgatggggctttggtatctttgccatcatcatgcccgttatcagtgctccgctctggggtctgtggtattatacccagaaaaaggccgaaaagatgaacttgacggagaagaagaacagtggacgaactctctggcagtccatcgtctactactgcattgagtttgatgttattggtctgcttatcatcgccacaggcttttctctcttcctgttgtcattcaacctatactcctatcaacgtggagaatggcattccccgatgatcatctgtttcgtggttattggcttttgtttgattatcgcgttcacgttctgggagagatactttgcgccagtgaagttcatgccctgggagctaatccaaaaccggactgtcttcttcaccttctccatggtggtatctctgtatttggcttggtacatctgggatagctacttctattccctcttgcaggtgatgttcaaccaaaccgtcacgcaagcaacctatatctccaacatttacaccatgggctcgtgcttctggtgccttgtcttcggagccatccttcgctaccagggccgcctgaagtggtgggccatctgcttcggtgttcctcttaccatccttggggttggcctcatgatcaaattccgccaacccgattcgaacattggatacatcgtgatgtgccagatcttcgttgcattcggtggtggcaccctcgtcatctgcgagcagatgactgtcatggctgtttcttcccagagaaacattccggctattttggctatcgagggtgtcgttgctagtatcggtagcgccctcggaggtactgtcgctgtcgctatgtggactggtattttccctgtcaagttaaaggagctcctcccggcttctgcacaggcgaacttgactaccatttacggctccttggttgtccagcagtcctacgccaaaggcacagctactcgcgatgctattgaccatgcgtatggtgagacccagcgactcatgctcattaccgctacttgtctttatattataacgtggacttcatgcttcttctggaaggatctcaatgtcaagaagatgaaacagcaggtgcatggtgttcacctgtgaatggtgtgtgcgccatgttagccgtgtaactacggcgcggtatagcagcacattggacaacaggaattcattggctaagcatatttatgtcgttgactctcctctcttcgtatacttcattagagatataatatcaagaatcttgtattttcctcggtactagtgacctggcaaagatttatttataaggctcaattgttgcgaatagagtcaggagatgcaaacatttatgtgttctatagtggttctcgaaattggcttgacgcacactgtaactctttttctgccaaggccttaaatttgtagggctaatttacactggtgacagcattgatgctattgacattgtggtcaaacctgttgtcatctggatctttccagaaaagttctagatcattttcatccgcctcttcattcacaatcctgccatttggaatacgaggatcaacgccttgaaaaatctttagtcctggtaatttagcatctttctcacgtgccagctgctcaatttgggcattgacatctagatcagattgggagactttgagtcaagctgcttcttgccatctcctgcacctcgagctagatagcatagcgtatgggcttcaatactgagatgcttgagctgcgaaaagtctttcagggagacgcgtacgggtgcgatttctagggcgactagctcctgcagctcgtctgcccattgctcctcataaccttttcggtcgtcttcggtcatcctatcttcttgacaggattgatattcctcatcatatgattcttgccgagatgtctcgctctccatatccaaattcaattcgtctaaagtctggcggtgtgtccaaagggacttgaatatcggagtcacgtataacgaggggttgccaccctcagggtataaacgaccaccgatagtggaagtaaaacttttcaaggccttggcggattcgatgatacggcaaagatcccagctttccattatagaatgtgtaaagctgatcttgctatagttggcggaacggggaggtggtattccggcttcattgctccacgttaccagcttaaaagcgaccgattcaatagccggtagtttacggaccatatcaagccgatgataatatgggtcttcaacgtactcattgaattcgttaagcttatcgtctgggtggaagttaatatttcgtagattttggcagtaagataccgattctgtggacgtagaggcctgatatagtaatgtttggagaagattcaccctttcatgattcctagcagatgaaaatcaaatgtattccagtaatggatacattgaaatgaattcaagattcggggcagctgcaactaagagcgtaatcagggcatctttaaactgaagttcttccgtgcttgaatcagatctatattactagtaagcaacaagcgtagcactccctgggatattctttgatagagataaaagctactggaattcagcaaggtttcgtgaaagcatagataaaattgactcgcgctcctgtgcatcttggaagccggcgcctaggattgcttgcttgagcctgtcgatgtccttaggggaaagtatagaatctcgaatggaattcttggattcaggatcaaatcaatcattccagttccgtacaggtccacacgccgaagataatctccaaggagggcagttcgtaagatggcaagtaatgtgtctggtccagcttggagtacagcttcatgggtctgcgggtacttctctcggccgaacttcaatcgatgatatttctcgcgatttttcagatcacatagagcatgtattccacggctttgttgtggcaaggccatgacgttgtataccaaaagattgttgatcacattgagcagcaattcatcgggaaaattctgcagggacggcatttttgcccgtatagcgacattgcgtcgaatcaaggcctcgggaaagcacagaattcggaacatgtgggcgtcagttgaaggaaagcagattcactacgatgtcggtcgatcaatgggcccaggcaccaaccaggcacaacccgagtcacaggtggcagtaaacgggtcgtgcgtaggctttgttgcacgtgacgccaagaccgaccacgatgagcgagcggcttaaaacagcgtcaaaagtggccgtttctggcatcccattcaccgtgtcatcctcaatgttaccttgttgttgtaggactatgtattcgatggtcataaaccatagttcccacaaaaggtgttattcaatatataacatgcgatatttggagtattacgatagacaaatctccgatagaactatagatgtaataattttctaggtaaaaacctaaccaaggcgactgcgtatcaatgattatggcgcagtggctggccttcttgagctagtcgctgatatttgactgcctttcgcagaaccataccatggctcagttgatcagtttcctggcggaagatctcctgccacggagtaccactagggacaatggggtatcccttggtacccaatgctttccttcgttgttcgatctcatcatcggtaatgagcatatcaacccgccgtttgcgcaagtcaattcgaagcctgtccccatctttcaaaatagcaagattgcctccagctgcggcctcgggactagcattcaaaatagaaggtgacccagatgttcccgattgtctaccatccccgatgcagaaaagtccatcgataccctctttcaagagtcgggctggcggatgcatattgacgacctccgctgctccaggatatccgattgggccaacaccgcgcataacgaggatggtcttctcgtcgatgtatggcgtattctccaggcgatgttcgtaatcttcgggtccatcaaacaccacaacagacccttcaaatgcctccaggtcatcggggttggagaggtatcgcttccggaatgcgggtgaaatgacacatgtcttcatgattgcagagtcgaagaggttacccttcaagtgagcgaatccggcatctttcatcaatggatcgtcatatggtttaatgacacgccgatcccatgtatgcttcccacggacattctcggcaatggttttgccattgcaagtgagcacatcgccgttcagctttccctggtctaatagctcagccatgatagccggcaggcctccagcgcggtaatattcttcaccgagatattcacccgaaggctgcatattcaacaacagcgggatggtagatccgatggtatcccaatcatccatggacacctctacgcctgtgtgctgcgcgatggcgttgatgtgaataggagcattcgtgctgccgccgattgcggcgtttgctacaatggcattctcgaaggcttcgcgtgtcatgatatcacaaggcttccggtctgcctctaccatttccacgatccgtttgccagtttcgtaggcacactgagctctgtgacggtaggcagcggggatggcggctgacccggggagggccattcccaaggactctgcgagagcattcatcgtcgaggcagttcccattgtgttgcagtggccaactgatggagttctgagtttgagttagattccggtgtcatcaatcggggttttggagatggcataccctcgggcaatgtaatccataaactcattttcgtcaatgtcacccgtcgcgtaaagctctcgcccatgccacaatacagtgcctgctccggtcaaagcctccttggagtaaccattgagcataggtcccacgttcatgcagatagcagggatattctagaaacatcagcatagatctaggaatccctcgagtctgatacccaccattgtagccgcagccatcaaacaagccggggttgtcttgtcacaaccagtaagcaacacaacaccatcaaggaaataccccgtcaagatctccaccaagccaagatacgccaggttacgatcaagggtagcagtgggccgtctcgaggtctcctggataggatgtgtgggaaactcaaatggaatacctccagcagtccgaataccttcacgaacacgcttggatagctcaatatgatggcgattgcaaggtgcaatatccgagcccgtctgagcaattccaatcatcggcttaccagacatgagttcttctttggtgataccgtagttgaagtaccgctccatgtagacagctgtcatgccggggttggtgcggcagtcgaaccatgcggacgaacgaagtgttcgtccaggttgtttgacggggacttgagcattgtctgcctggcttttgactcccatgcgcatttctagttcctggttgcgtcgtcgcagggcctgcaactcactcagacagtcctcgatgttgattgcttgaggttgagcgtcattgctgcatgaacagccttcacaggacttcttgtcagaacacgccatgatgttatagatgcactatcgattgaggtaatgttataaaacatttcgatgtgaggggagacaatggattatatatggcaggcttcccatttgtgcttccttgaaaaatgcggagtacagtcgggagacactttccgagacatttgacgtcgaatcattggaatcgtactcgggacaatttgttgaaatgccccgcgtgatcacggagatgagccgagattttgcctctcgggatgtgactacccggatattggtctcttagatatatgatgttaattttccattgatgtaatttccaataactctctgcatcaatttatcgacaatgcaaggtctaaaccatgtaaagacagtgctcgacaatggcggcctcgctctgggagtgtggcagctattgcccggcagcaacatgtcgcgcactctagcacgagctggatacgattgggttttggtggactgtgaacatggaaatatcgatggctagtgtttttgtcattattcgaaagctcatgctaacattcccacagacgccgcaatgcacgaagctgtccccgccatagtatcatatggagtgagcccgattgttcgcgttccggatttccaatcttggatgattaaacgtatgttaaacagagtatatcgctagcccacttgacaatctcttatcctttgtataggggctttggatgcaggcgcacacggagtcctcgctcctcttgtacgaacagtggaagacacaaaggccttcgtcgaggcctgccgattcccaccacaggggaaacgaggcttcgggtcgcctttcccgatggacaggtttggtaggaatgtatcagccacccagtacctgactgaggccaatgccaatcttctgctctcagtccagattgagacgagagaggcttttgacaatgtcgattccatcgccgccgttgaagggcttgatctattgtttgtcggaccttttgacctggcaaatggtatcggccaccccgtactaggtagtacatttgcgcctgagttggaacaagccattgagaaggttctgtcttcggcgcacaaggcaggcaagaaggctggaatctactgtggaaatggaaagcaggcaaagaaatatgccgacttggggtatgactttgtcaatgttgtaactgacgttggtgctctgactagctcgctcgcaagtgagatggagattgtcactcaaaaagcaggcaggactgcctctgggccttacggtagctagtgcatcctatatactattgaaacgaattttgttggtctcgctcttcttgatcgcgtaagtcatgaaggacatccatagatgcaccgtcgcgagaatacagtcattcataccagagcattccagaacgaattcgactctacatcaacctgaaagccttgggcaattgcctcaaggtccagatccgataattccaaactcatctgaaaagatccaaattcaagtggacgatctgcgacgccggattctctggcaacattaatagactcgggcatgaccatgtgctcgctgggaaagttgttccctgcgcttccagcgcgttgattgtcgtctgcaacattgattcctaagtgagaaatcaacttatccaaattctccctggccttttctgctgcagaatagaggcgtgtgtgttcaataagaatatttcggcaaaaaaccagtgattggaacatggttgagttactccctttctgggccacaattcgtgcgtggatcgttgcactgatatacgtagcatatgagagcatgtatggtgcactgctcaaagagaaatgctgcgagtagtcatggagaatctgaacaatttggttcgcagctgcggtacatgcattcaccgactcgtgggcagttgttgaattgatgaccccgtcgtggccggttattaaaggacgatggagcaaaataataagcacattgaatagagctcttggcaaaaattagtagctatcaattagtcctggttggtgaaaagaacatacaaaagacaggcagactgaggaaggagaaccgcctggtctgggaatgacagatagtcaagccgacgaggcaaattttcgcgccagtttctcagctgtgacttgatttcccttgagatatttgctcggtgaaccagatttgactctcgagattctgaataaatctctcggagaatacgttccacaatcgttgtcaactcgcataaattagtgagtaaagaaacattaagcgatggaaccactactcgaggctttgtggtcatgtatgtgataccctgaaagggttcaagctcgtcaaagtcatccagaaagtccagtgacgcgctcacattgacacggttgagaaggggaggtctcccttggaaaagacactggatcttatcaataactagttatcagaagttagagacgactcgtaagacaatacccagtgcagaaaagtgatagctcacagtatgctccccagagaactcgctttcgaatttcaagttcttcggcagggatactatccacagcaggaagcacatgcagaccaagatcaatgaacatattgaaggcatttccagcgtagagccatgacagactcctttcatcacatctggaaaaaagcgcattagacataatcaataatgcctgaagggtagtgatttcgcttttatcaaagcaatctcgcaaaagctgcgtgaagcgttgccggaacttccatcctgcagtcgtaatgtcatttggatcggaacgaagctctggtcggtcgcagtgcttcgacactacaaaaaatatcgcattcaacagcaatttagagaagtacggcccctcgcaggccatatctcgcatgaaagccggccggtaaattatctgtgctgtgtaaagctgacgactccaatatatggagagtagatgcatgccaatatcaggatcgataccatcaaaatcgagtcttccggcagcaagattgagtggctcaagctgtcctgttctttccaaattagtatcataaccatatctggtattgcagaaggtgcgacttgctctgcctcgctgtctgggaaaagagaaaatgccttgttccctcttcgttggatggacctagtctattctgctcattatagttcggactggtatcatcatacaccgtacttgttggcccatgatacaatgatgtgtttctgcggtcgttctccggtatttctgggtgtgatgcatctctagttggaacggagggagagtcattccgcgagagaccaatacctgttactctcgagaatggcaatggggtatgtggagtgctttccgatgtaacagaatgctccgggtccgatagaaccctttcggcagaagtgctagtttggaattgggcacatttctgtcgaaggatttcattctcctcctctaattccacaatgcgatggatggtcggcccaaaagcgaagtatcagcaacttgaaatttggtcgtaagagtctcatttgtacctcgggttattctgggccacgcatagccgacaatcgaggctcttggctagacagttcccacactggggccgctggccatcacacttcaactacttgtttgatccaataataagttcgaatcccatgtagaggccaagaatacgcacctttttatggcgacaacgcacacacgctacggctactctctttcgaatttgcattgtgcttcatgaggtcggaaaactatccgagatttgcttcacctgggcattccattggatgacgtcagccgtagcattacttacataaatagtagccttgtttatcaggcaccataaagcatatctctgcgttcttcttggcgggcggtattagctatagagtaaataatacaggtgagtaacgttttcaagcttaatgcttaaattattaaggatcaaaaagccgctataaaggctacacgcgctaaccggataaaaaaagctttgcaagcgccgcgctcaatgcaaaccataaaaaactccaatgaatgcaccagctccatgaacttcaaacaaacagctgaaggcaaggaccgaatatcaagaccggagtagacctcaggcaacagcgtcgaccccctgccaacaaaagggaactctaccaaccaggaataccagacttgcatctaatagcctcaccacaagagccttcaatttccactaccagacatagccgcatcctcagcgacacctccggatccatcaaccgctccacccgtcgcagcgaccacgcgatcaacctcgctgcggcattcgggcatagcgctgcgcatctcgcgggccagcacgtcacggaagctcgcaaaggcctcgcgcttcccgcgcaggtcctgattaccacgttgcacaagctcgacgaactctcgcgtgtagatatccggattgcgcgccgagtcgacgtagtcgattatctctggtgggagctggatgctggcgagggaggggttagaaggatcggtgttggtgtctggttgggtttcttgtgttggcgaaagttgtgtgtgtgttgacagggtcgaaagggcgagtgttagatttttgctggagtgtattagttttggttggttagggttggggtttagtgatgttgcttgtcgggaagtgtttcgttctgacggggcacatttataggcacaatgaatggagagtgcataggatgctattgcagttgacgtacatctttcgcacaagctcttgctgtgtctctgggcccagatagccgtggacggcggattgtatctcgaataagtgctggatcacatctttgaggtcgtctgtgtgaggagttagcatgtgcactctcagagctacctagtgctcgtaactcaccatcgaccgttttcaaagtcactggcgccataatataatagattgaaagaggtctcggttcacaaactcaagatgaggtttctcttgctattgcggggagaaacaaaggcggtgtgggggatacttgatcccatctacgattacagaaaacaaaggaaactactaactaactagtgttttcggagacaaatttttaaaaagaacttatgtagtttccaatatgtcactatctatatatgcatagctcgtgggaaccgatctcattccccgagttgcgtccgcacggcgaacacacgctgaaaccgcatcaagtgaaacaaacaagaattgtaacctatgctctacacttcccgtgtcctcaagctagaaagattcggaattttgatctctgtctccatttcaagcccggacaagcttgggaaccgttggctgaatttggcctcccagtcctctcctgtagggcttgccggagtctcttgggaggaactatggccagtacccggtcgcgaggtggctgcgccagcgcgcaaattcttgggtttaggtggtgcagctggtcgatttgcgggacgttgcgcggatgggtgactggtaggggtgacagattgcgggagacttgcggagatattaggtccatctcggcgatctgggagggccgtcgaactctcacgaggagtgtaggtcgaacttgatgtgtgagaagcgagcagctggctagaggtgacggatctggcctcactctgctttgccggcaaagaagaggaagtctccgtgaaccgtccatatccagtagcagtctttggaatggtcggtttttcagactctccgagcaacgactgtaccttgctctgaattgcgcgggagcgtgcaccatcgcctatcactctgccacccccgtcacccgtttcggcaacccgacgccggtactcagctgcggcattggcaacgcgtttctcctcttgagagagtcggcggcgttccagctcccggcgcatctctggtgatatgtcgtccctgtccgcgtcttccaaggcaaactcgtcattcggcgaaagaccatcgtcggctgaatcccaagtcccaatcagaccctgccgaggcgcatcctctggcgatgatgatgcggatttgtcttggttgcccgcttcgaatcggcggaatgcgtcgccgaatcgaccggcaaataggtttttccctccagaaagcgacaacgtagacagactagcgcgtttgttgtgtttgtggctattactagagcgtttctcacgcttccgattgctctcttcttcttccatcgcgcgtaggtaatcgatgtcagaggaaataatccgatcagactcacgatccacatccgtacgcactgaccgcagtggcgcgccaccatcgtattgtaggcgggaaatatccagcgaagcccgcgggctatcagagtcacgcggctggtcatacctggctcccggctggacggacattggccgagcctttccgatagccgatttagaacgtcccacaggatcatttacctctaatgctgaaggccgtctcaaggtttccatcgaggggcgggcggagttagactggctgggtatgcggtcagatggcagccgcgagcttccttccacattcaaactcggcatcgggggggacggcgctttgtgcgggcgtgtcactctttgttcctgctcggttgtaaatggctcgctggaagatcggggttcattatcagacgaagggaatcgataaattgggcgactcagcggatttggctccggcaaacgaggtgtttggatgggtgaggtcatggtacctgtcgacaccatcatgggccgctgaggggttggctggtacaagggaatagcctgcggcgcaggcatttcacgcaaatccggtgctctgacaggagatgtctgggatagtcgcttactgaccggcttcggagcacgttcgggcgagacacgtcgggcaaaagcatcatcggctagggcgttggtaagtcttcgagatagatcctcgtcctcgggtttggattctactgttggctcgaattcaaacttgtcccctttttcatgcaaaaggtcaaactggtccaaggaggggaatcgtttagacatttcctctgccgtcttctttcgggatgcgctcccatccagggctgcaaatggatcatttgatgaaccttcagcagcggctagatagggcgcaggactcggtctctcggagccgagttgagacgacggggatttgccaggtcggccacgccgcataggtgcaatttctgggattatctcggtctcctgcatcggaggcgaaaatactgcgccgaccgcgggtgtttccgtgggcgtgggcggtagctcttgatatttgcgtgcctccgaaacagagcgcttggaatagatcttcgtgacagtcagtatcaagttttcactaaaaaaagacatgggccgacatacgtctttgataggaacttccttcccttgcattttgcacacctcgcgcacgacctcgtatatgttgggacgattgcgaggatcttccttcaacatcgagcctgtgcgcagctgtcagccattgatgatcgattataaattaaatcaaagtcttaaacttaccaatgaacagctttagccgactcgaaaagggaggataggaagggtatttgaaggtcgcgttgagaatagccatctgaccgacctcttcgaagggggttgtgtagtagcataatttgtacaaaaacacaccaagtgcccatatatcactcttctcgtcaatcggttgctttcggtagacgtcaatcatttctgggcttcggtactgcagggttgtatgccgctgcacatcatcttcgatcaagcgaccctcagcggcggaagtagcagcaggacgagggggtgctgatgatccaaaatcacacagtttgtaagtgggggaactccccttgcccgagatcagaacgttctcaactttcagatcacgatggaggaggggcggtttgagataatgcatgcacgcaacaccttcagcaacatcggagaatatcttcacgatctccggctctgtcaaccggtgttggagccgggtgttcatgaagtcgataagaccaccgcccgcgcagtactccatgatcagaaacacctcatatccacctccgcgcagctgcgaggcatgcgaatcaatatacttcacaatgtgccggtggcccttgagcttcttcatggtttccacttcagtgcgcatgttggcaagggccgccttgtcaggcacggccactcgcttcagcactgcggtttcggacccattgactggctgaggcaatcgcaccacgtagacatgagcaaaaccaccctcagagagatacttctccactaccacgcgatggttgccaacttgaatcttagtgcccggaagcaaggtccccgcaggtgctgccgctacggcgacgggattgtagacggggaattgacgtgacgtcgcgggatgaccgtgggtaggttgtgaggacatggtgccggggtgcccttcaagggcaggtcgtaaagcggttctcggtggctagcgacgcggcatagagagtgagacggagattgagggggattcgaggttggcggagataggtgcctgcgagaggactaaaaggacaggttggcgaagaggcggagaggcggagaggcgcagacacggggtagtacctgactaccagactattacagggggatgacaagaatatttgaagctgagatgggataaaaagaaaacgatcaacactcagatggagagagaggaggtattggaatctcaagtggaaggccacccaatcaccggctgcggatcacgttatgccgagtcttgtccctcaccatcggggttgttttccaccttcacttctcctaaatgatgactttcaatgtgtcttcccactggcagactaatagttatccagtgtttagcatgaccgaagtgggccaggatgaatcttaattgcctctcataggaccctatgtcctcttctccctggtcatggtcctacacctcatgtcccggtcatgggacgtctactccgtatattgatacggcgctctcgcaaccgtggatggtgaccgtgagatccacgacatagctgctttcctccttttttttctttttttttttatgaatcaggagccccaacatgggagtcacattttaccgcactctccaccctactatcagctctaatccagtgaacaagcctcggtggctacatcctccaagtcgaataccttggacccactacgctcaaattatctcccccaaccgcttgaccgcaagattaacaagtgttttcagcgctccgccccaagcgctatatgctcggcgaagacacttgaaatacatacttggaccgaatattcttcgcgctggtccgcggctcgaggtacacaggcattaactgcaaccgctcgtgaaaacaacctacatgacgctcgcatgcttggacttttaacaaacaatgtcaacatccggagcaccccgggcttctaataacgtgccgggaagaggctcaagcggccaatacgaatacctcttgatcacagagaagggcgctaactgcgaaattgacgtaggatgtatgatatagcagcatgcgagatactatacatctttggacctgggttataagcctctaactggttttttttgcttctattccccacctaataataacccttcctccatatctcaacagtgcaagaaagcggagagcaaggcggtcggaatcatggaggaacgatattccgagcggtaaatttcccaaaatagtaagataaaaacaaaacagtcgtacttttgcgatgttgacaggactctgagcattgatgcctgtgcaggtcgaaaggctttttcaaaagccccttaattgagaacaagcactatgtagtcatagctttgaacaatttcattgctataactagtcaaaaagctcactgtaattgttcctgtaattccatcccttagctcggtatagccacgtagaatcgcgtggcctccggggaattctacataattcgggtaatagatgggagcagataagaattgaggtctttttctagtgcgtttgctcatttgtattgtcaaatttgtttttgatgtgatggccacgtcgagtgatctggaagcgttggcgccgatccttagctcccacacttgtcttccaaacaaaaacccccccgtgtcagacttaggtactcccgcgcttccaggtttttgctttgagatttggattttgtttggatttttgagcttagttgtgtgctttttcttggatttggcatctgagtaccctccacagcactgagcgcctggggcctcagtgcaacacttgtcagactaatatgacctggcagttgactctcgaccgcgagcacttgtccatctaggattgatccggtggatcaacccaggttatagctagtcgttcgatcgacgctgcacttcgctgcactgcggcgcatctatatatatatatatatacactgtcgtcgctccaggctgatccaacatggacggtccaccaccgccgccgccgcctcatggagaaaatccccatacgactgaaggagaatatcgcaaatcctcagacctgccagatggcaactacgacatttttatcatcccacctcactccgctggctcgggcttcctctaccttccttccctgcagtgcaaccgaaacagtttcctagctggcgtcgcaagcaccctcctcgcatgttttgtatggtcgtacctctccccgattgtgaaggcttggtatctagccacggtcactaacggcaatggtacgggtatggcggtacttgggatcggggtgggtgtcgctggatggctttttggctccactcagtccagtagctcgggagataaaggcaatggcggcgcacgtggtgggcggttcggatttggtggctttggtcgtggttctgggggctcgggtggctctaggaacgccggtccaaacaccaaccaacagtcgtcgggtgccaattacggcggcaacggggcgggtcagcaaagacaacagggaggaaactttggtggaggacaaacccacggcaaccaatattccggtaatcaatatggctctggttctcctccaaagtctgataataacaaacgtgaaaaggaggaggctgaaaagcgcgctaatgaggaacgtgctaaggaggagcgagctaaacaagagcgagccagagaggagcgtgctcgggaagaacatgctagagcagagcgcgttagagaagaacgagctaagcaagagcgagccaaagcggaacgtgctaaggaggagcgtgctaaagaagaacgcgtcaaggaagagcgtgctagagaggaacgggctagggaacgagccaaagaagaagccgaacgggagcgagcaaaagaagaaacgagacgcaaagaggagctacgccgaaagatggaggatttcaagcgcaagcgtgaggcagatgccaaagaaaaagagaaaaagcgcgagcgcgaagcaatggagaaagaattacaggaacggcgcgagcagctcgaaaaggagatggctgctgctagggccgctgtagagaaggaggcacgcgagcaactggagaaggaagccgcagagtcccgcgagagacaggcaaaggccgaagctgaggcgaaggctcaactcgaaaagttggaagcagaagctaaagaggcggccgctaaagaagctgctgagcaaaaggctgccgcaaaggccgccgctcagaaagaagctatagccaaatttgcggcgctcaaggaagcagcaagcaagaaatacgctgagaagaaggcgcaagacgcaaagaaagaggccgctgccaaactcaagtcagctagtactagcaatgtgcctcgcacactttctcccaagaaaccagcaccccacccaaccaccaaacctgccaacgatgacgatgcgtactcctttcgtccctacgaccgaccacggcggccatatgcggctggctcagtatactccgagtcttcttatacaccttctcactcgactgcgcgcacaacacctcccccctcacatcgcagtacatattccaccaaggatccagacaagattgtgatccaaggtgtatacgccttcaataatgcctttatgaagaccccagtggcgcaacttgtctcaggccaaggtatgatcaccgatgggctggtgctgcgcatcacaaccgaaggtctcttcatcgacgatgacctacgcggcatcggccagcgtgagtgggacgtcaaagcatggaccatcaagctggcggaggtgtggtgtccacagttaaactctgctccatccgccaaaaacgcgtccggcaaccctttctctttccgtcgtgggaacaacgttcccaccagcgaagaatcagaggccttcctcggccacttgcttaaagtatgcaaaaatacttgccgcctagcttcgcgcagtgctactgccagccatgatggtggccctgtccacccgccccaggggtctcgttgtctgcacattctccgcgccagtgttcgtgaccaagaaggcaagaagtatgtctttgtgctgcaggatactgaggcctggaaggtcgctatcggtctccagcggctccgggctggagctctggtccgctcgctgggtgtgtgctctctgccggtccctgattgcaaaactatgctcggtgctctcggttatgtttgattgaaaccttgttatgccagcgttcttgttacctttcttgcattttatttatatcccaccatttatctctatatgcccttcttgtgttcgattcgacttgaacgtcatcactcattagcggcggagtttgcttgatgctcttctgtccagtatatccattcgttactcttgtcttcttcaacccattatcttttgagattcccctggtttatctgttttatgtttattattacggtttttcaacatgagggaaagtatatatcacaaacgttacgacagcttacatatattgtttattatgcatagttacatggcatgcccaacccttattctgtatgatggttcctcaaacttgatgtcatcgaccatgtatggtgatcaatgtagcattgtcataataggtaaagagaacctcacgagccctagagggctgcatgtaactagaaagtagaagagaatgaatcatatctgagaaatctttgttttatgagtgtcatgcaggtatatacgccgcatattcttctacttgactatgtaaagagtgacaacctcaccaagtgtatcgagagccgaaagatgcgaagcaaatctttatgtcaaagtccacattggagtaaaccccagagcaataaaaaaaatagacgaacgccgaaaatggttgatcggatgtagagcttgtagatattccgtacacattgatttcacgtccatagatgtactgctctcgtagatccattccagattgcagcactcatatacaaattatccgaagggggccacaatggggaaagaaaacattagaccgaagggaaaaaaaaaaacaatatcaaatctatcagatcgggaatcatatggcgtctccgcggaaacaaaaaaatcgtgatatggcgggcagtgggcaaaaaagtgaaaccccagtatccaacagagcaatgtgtgagatatcgaggtgcaactccaactccggtcgaagacatgcaattcctgttttgagtttggtcatcttgagacaaaagatgaaagaatcggtcgtggtatcgggtgaataggatgagttcgatggcatcatctagaatgaaaagccgccgtggccaccaaaggagccgccgccgttcatcatgtttcgaagaacatcgggatcgatgtggtgaacgccgccaccgaagccgccgaaacctccaccaccggggaaaccaccgccgccatacatgtcagctgggtccctcagatcgtctccgttatcgaaagcagcacgtttcctaatgaggttagcattgtgtcgaatggggttgaaagttgtggcggacttactgaggatcaatcaaattctcataggcttcaccaatttccttgaacttctcatcgccggctgcaccgtcacggttcttatctgggtggtatagaatagccaacttgcggtaggccttcttgatttcctgttcgctggcatcactctcgactcccaaaatcttatagtagtctttgcgttgagacttcttcagctcgaattcagcttcgcggatctcctccgcaatgccgctctcgccggggttgttctcagcaacgctcttatagtcacgaatagcctcctcccagttaccggccttgccctgggccttggcacggtacttcatagccttcgtatacccggggtcgagacggagcgcttcggtacagtcctgaatggcagaatcatactccttcaagttgatataagcctgggcacggttacccagaatcttggcattcatatccttgttggaggggtcaacctcgagagcctgtgcccaaagatcgatagcacggcgatagtccctggccttgtaagcggtgtttccttcctcttttgtgcgagacaacttctgcacaatgcgcagtagcttgatggcctgcttcatgtccgggtccagcccgaggcacatcttcagaaccttctgtgcctgctcggtttcaccgagggcatagaaggcgcgggcacggatcatcatcgcatccgggtcctggctgttctcgcgcagcaagttgattgcaatgtcctgtgctctgcctagcgagttgatgttgttcagcctcagatgggcctcggcggccataagcgtccacttgcggggctcccggacaccttgtccgagcccttggcgtgcctggtctagacagtagatcaccatcgacacaccgcggtcttccgctattgtccgctcggcttgcgtgacgaagcgtaacatcttctctgcggctgcccggtcggtggcagtggctggtggctggatacgtgacagcacctctagggcctctgcaggacgacccaaattcgtcagaatcttagcccatcggtgcatgatcttcgggttgccatgatcgagctcgctggcacgttgaacatcctgcaacgcattcgggaattgtttagcggacatgtaggccgccgctcggttagagagatagactggtgagttgggattgatctcgatggctgcagtacaagaaaatcatcagcgaccccgctcattcaaggctaagtcatgagacacggtgtccctgtgggatagagaaaatgcatacccttgttgtattcatcgatagctcgtcgataattgccatccttgaagaacttgtttccggccaacttgaaggagtcggcctcgtcggcagaagatatattcgactggtgcggtggcggagtcggactccgctcctcagtttccttcacggcatctttcttcacagcatcggtcttcgccgtctcagtcttcaccgcatcagtcttcaccgcatcaatcttcgcagcatcagtcttcagggcatcattcttgacatcatccttcacagcatcaatctggggttccttgggatcaatatccatgaaattctgctgctcttcgttggatgctgccatggcggacaatcgacgacgtagctcgtcaggtgggagattgagtggatgtatgtcctggtcacgcgaagaccgggcaaacttgaaattggcggtcggtccggaattggaggatgaccgactgagagaaaagtatgattgtttggcaggtttgggagatttggtgggggacgatgatttggagggagatttggtaggtggcttggttggggatttggagggcgacttcggagatggagatgtgcgcgaagcggagaaggaagatcgagacggacgtagatcaggtttgttcttctcggtcttatccttatccttgtcctttttgaagatgtgggcgagttggaccattgggggtggggagggagtttttttttttttctatcgaaggcggtagaatcggggagattcccacggtgtgaaccacggatggggggaagaggaatatcaacttgggacttttttgcaactttgcaacttcaatttgcactcgggaatcttttgattcaagtctgagccatgccttgtctctcactctctgattcctgtcatgttaatctcagaaaataataagaaggttggtggttggactgggtttggtaacctggatgcttgatgccggggtgaaaaccagaccgagaaatcagttgggcctgtcctcttataatatatatattttttttttcttattctatcatatgttccatctttgctactggctggcaaataatccagaggctggagagctcctggtctgtgttagcgcgcaaaagaactggagcaatggagtcactcatttctggccgggattgatgcccagccgcgagggggaagggaaaaaaacagctcgaagagattcgagaatcttccgtcttcttattatcgtcttaagtctatcaccccctcaacggaacctgcaggggtggttggcgaggctgtcaatgactcgcggtggagcggtggatccaatgtgcaggttgctagtttctacgctgacgggtgacaggtatacagcagtaccgttactggcgtttcagagagtgggacccctgtgtcgggctctttgctgcgagattattcgcactaataatcttgtcggaaccggctctccatgccgggatacacttaacgtatcgagtgtaagtcttggctccattaggactcgtctgatatacatatgatatacatatgatatacatggtactaatgtctcttaggggcgaaaccaaggtgaaacaccggtcttacagcgtcataataagtctgatttacaaaaagaagccaaaaaaataggagcaaagcgaagcaagttgaagagtgagtattataatgctagtctgctcaatggatttagaatagctgtaaatagcgtcaagggaatatgtacagagagaaatataagagagagtatagcagggagtatagcagcagaatgataagttcctttgctgactttagggctatttcaccgaggtatctagctaccacgctgttgttcttatgtacccagttcctcgcggggctcccgcagcaatcatttcgttttttatacggcaaaccttgcaaaagatcgtttacgttacgtatgagcggaccaatattgagggtagtctctcctagatcaaaatgagtttgatattgcttagtttgatagtggagatggcacattgaccccctgttccgttcccggtagcgcatttccgccagcgttgaactcaaagccaatattaagaggaaccaataacaggcgagcttgttaagggctgacggggtacccctcttcggggatataacagtgagcaaaaagacaaccccaataaatgctcgatcaatcttttttcaagcggccttttatactcttagaacaggcgagaggaaacaatactacagctatataatttgaaatcaccataaccactgagccactgaaagaaagcagccaaccaagagtcagacctgagatgaaaccagaggtgttaccgcccctttcctttgtctattagcggtactcgggttcttatacagagaactgtttcaagggaagtctaaatgtatcgctcaatacctatctatttggcattattgtcgtcgttcacagatgagcgagtgagcttccggaatcaatatcaaagacgtcataacgctaagcggtaatcacgctgctcatgcccaattccgcctctcctcatgcattctttgggcaattcggacccagctggaaacccgatcatctcctagagctgcgtcgtatgtttgaataaatccgtgttcgtcatatggcggaggctggaccagcagatcctcccgacgaaggcgattattgtaatcgatgtgctcatcaaaacgttgaaacacgtcgcgccatggtctaaccggcgaaattggtgagactggcgaagacgctgtatcatcttgaggctgagcatcatatgcaccatgcacatatatctctccaacaatccatttcttctcatgttcgagccaagtgatcgggacacagctccgtgatcgtgggggagaatgtggaatgtgctgtatacgtgggcgcacctcgtattcgtggttgaggaacagttcgtccggcggaccaattggacgtccacgggcttcggcccatcttagattcgcatcgattggggagcggttcggtgaccggttctgtcgtgtgttacgatgctgtgttggcgaggtagcgcccgttgaagaaggtctcggtggcagaggttttgagaacaaatattgaatagaagcacttgaatttgcttgaacacgaggggtcgttgtatctggctgaacaatgaattttggattaaccattgccgcaccccccagggatgagagatccatgataggacagtcgagatcggagcctttgagaggctcggaagctcgtcgcttaggtagacagaaaagcgcgattaaatagggggcgcgatgagtagatcatatatcatatggcttgatatactactatctttagatagtaatatatgtacgctttgggggcgttcaagagtggaccatcacggagggctcgtatctagataatacaagggaagttgggctaaaaggctccttcttagggttgatgcatttactattctctggagaagggaatataacacatactacggagtatgcagggtatacacggaagatagatccttaggcagtgcagtggcaagaatgctcttagggccaacaaaacaccgacgatcgttcatttctctgtacattgcgtatcctaaagtcatagccgaaaatcaattgcccgaatacgaaattgtgccgttccttttcaggataatgatccttacaatttggggtccaaattcacccagggggctgtgcattgttttctcatcctcactgcaatggcgttaactcaccagatatattcgggcttcagtgcgccttgtggaaagtaacgggaatggagtgccgaggtatgtccaagggttgtcggagtaagatatattgcaatgagaaggagccggactcagggctcagatacgatatgtatttaggcttgagaatgattacgtatcacacactgctttcgtcattttcttctgttcctttgcttgacgggaattgtccgagtggaactaaaagacactcgattcgagagtgtgaagccgctgattgtcggtgaacaagccgatttcccactcactgaactgtggggctctatttttggctgctaatcgtttactaggtgtgtacatactacatacggagtacagatcttatactcatgtgaacctatgttgtacatagtacaagaatagtcgaccgcttatacagccttctcatatcccgcagtttgtctggcaatactagtaacatagactctactgagagctttcaaaatggactggtcgatattgaaaggcctagaagaaatgatagatttatgaatgtgcaaaaatgatacattccaaataggctacaggcgctggagagatggagaatgtgaaaagctgtcatggtttacattaaggtcgtgctcaagccaccaagcgagcttcgcacaactccgaagctatccaggagagcccgagaagaaataaaaaggagtatgtatatcaaaaaagcaaaaaagggatagacatatccagtcagaaagcgaccattgttaatggtaaatcaccagaaaccctaaataacaaaatcctcttcttgcatcacctctaaacaaccactccagttcggcacagtgacaactccagagtgagacccaagggaccccactaggtctactagtgcatcggaaacccaaaagatgtcatttacaggaagaaggcagcaacggcggcggcaccggcgaagccgagggagccgctgagggtagcaccagcgttgaaagcaggggaggaggtggcgggagaaacagggacggtgccagtggcgacacccttgctgctggagggaacgtggggaacaccaccggtggggccgtgggggatgacgctagcagcgggggtagtggcagcagcggacacgggcacggtcgagtagataacggtgggcacgcaggtggtgatagcaatcacggtggaggagaccggggcggtgccagcaggagcgctggggacgctggcgggaacgctgggaacgctagcaggaacgctgggggcgctggagggagcccaggtggggacggaggaccaggcgggggtctcggaggaccagacaggggtctcagaagacgaggggggnnnnnnnnnnnnnnnnnnnnnnnnnnnnnnnnnnnnnnnnnnnnnnnnnnnnnnnnnnnnnnnnnnnnnnnnnnnnnnnnnnnnnnnnnnnnnnnnnnnnnnnnnnnnnnnnnnnnnnnnnnnnnnnnnnnnnnnnnnnnnnnnnnnnnnnnnnnnnnnnnnnnnnnnnnnnnnnnnnnnnnnnnnnnnnnnnnnnnnnnnnnnnnnnnnnnnnnnnnnnnnnnnnnnnnnnnnnnnnnnnnnnnnnnnnnnnnnnnnnnnnnnnnnnnnnnnnnnnnnnnnnnnnnnnnnnnnnnnnnnnnnnntggggggggtggtgctgccggtaggctcaacaccggcaccgctgttgccggggcagttggtgacagtgggagcgcaagaggtgatggtcacctcatcggtctcatagacggtcttgtcggcaccgggggcggcaatggccaagctggcgaagagggcgatagtggcagtagtgaaacgcattttgaatgttatgtacgaaaaccgtaaaaagtgatgttcaaaaaaggtatatataaaaagcgtagcttcttgtttgaaagagagtgagttggtgtttaaagagtgtaagaccgaagtcgagagagagtgaatgctttggaagaatgtacttggagagaagaaagaaacaaaaactacacgggggaggcagggggcctttgtatgaacggggagattagtgtcagatcagcagccactcgctttctctcttttgggacgagtttggccctaaaaaaaggggaaaataagaacgacggtgtactggatacttcatccactactaacccacaccgcaacctgacatgtacctgtaacctggctctcgcacttcaatttaggccattctatgattggatcgatggcgttgtttcgaattaccaggtaattttgacccgccggtgtttcttttacttgtgacgatcgcttcaacattagggacgacgacatatcaaatggttatatcctccgtcctaagatgcatatactccgtacgctctcccctcaagtaagaattcaactgcaataatactcctctgcaacacccacttcctctcagatgtgttctttttctctttctattgatgtttcagaccgcatcgccgatccactacccgtccctggcgtcccagttgttggcatttccccgtgggtctcttctcatctccacttacccctgaacagcccgccatttatttcgccaagagaacgtattgtgtaagggcgaatgatgatgtgcactttacttgcaaaatgggattggtttctactattcatattactttggaacatggaaccctcttcctttgtcggagcgaagcgccgagacatcctttgtattattacttactatatacgggtgctccgtactccgtactgcttgtatattagtagtaatttttgtattactgcactgtttcctccggtgcactgggtatatcgtcgtccgagacttgttacgttgaccatatatagcatagatgaacttaatatattgtactcatcgtgtaaccaatgaaatactatgaagaccaattttcgtaaaactaaataaacccaaagagcaatgccaatagtacaagtcactcaagagtcaagactgccaattgcccccgcaacgggaaggtcttgcttcacgccataacggctagaccgcattgttttacttccgggacagtgcttgatgttgcttgcatctcgtgcccctgttctaggcaatgtgggcgtcaatgcccaagtccgagcgcagtttgaggaaataatatcagggtctgaccgtttgattggtggcgtgcatgcagtaatttggagttacaccggtcactcgagctgtatgttgtagtctgtagactctagagtcgatttcctgtgcgaaatatgtaccctaaaatagctactcgtgtagatcaaagcgtgttgatcttcatcctgttcctgggtcgaaagttcggttcagactttcgaagtggttcgaccgtgcaagtcagggcaggatagcgatgtatgttgattagccaatgatcgctgagtcctggtctatgtccttgactttgactttggacccgactccatgataggggtttgttcacaccaagcggtttccgtaggccgcccccagactccacctacctgcgcttcgtggcccctttttcaatagatcgggcctctattctattccaacgtgctttgtatggcatggtcgtattcttatcaaccccatactcatctctggtactatctttagcttcatttagctttgtgggatatgattattggtggagtgtgtttgatatataaagtacggagtatctggcacaacgttcagccgtaccgttaatgatagggacgtgatttgagtggatctaggctttttccgaagttcatcctcgcctatcgcgtgagaggtccttgaccttcctcatttgctcctcatttgtctaagtctctgatatttagtaaggggctttcgcttcaacactcaccgctcatattgcagtctcggggttcttagaatcctgtaaatatcctactctccttcctcacatcttgcaatattcttgagcattgccctgcgccacgagcaagagacggatatcatatcggccaggtcaagggatttgtgattgacaattaagtcgacttgactgcacaatgacttgaatcttgaaatgacaaattcaatagcactttttcttcgttgtataacatagaatgatgtccttagcgcccactcaaaagcacttccgtgttgatgcgagactgttatcggctactctatcacatcgcctagtcaactctgtaggatctgattgcgtgtgatcgccatcgacaatcacagatcggacatcaaacccgaccgatcagcatcgacgcgtcatttttagcgctgatgacacaagctggcggtaccgagaagtgtggtttttgtctcttgaataataatactccgcatatattccagatacacgacatactgtacaccacaatgggctatgcttgaagcgccagtgagatcgagatctcttgtttcccaaacagcgactttccgtataaacaagcttttcgaagacaagcagacaatctcgtcagatattcatgatattacttttatggctaggtcgaacgtcattcaagatcaactattacgacagggtctacgtacaacatagtaaattatatacagcatacggattatgcattctccagcttcctagatcgagattcacctggcgcttgtctcatattgtaatatccacaatggggcttattgtactattttgcaatacgcttgacctcatgttaggacttggcaccggctttcccggcaagaatgtctaattaaatcacagccttagaattgaacgcttccacagtaactgatctttttttaacgcccaaatttcgggaaaagacagtgacactgaaatgctactggtgcggatcgactagggcccgcccatgtcatcatcgggtctcattgcgtggccacagatttgggctaagccacacctttccaagggatagaatcgtagttataattatcttggaattagactagaattggttttggacgagcccctcgatgacatattgcatgtataggtctcgcggtagaactggatatcgcatcgtatacggagtactctgtacataatacgttaatacgttggatgcatagtgaaaagtcggtacttctgtaaggctggcagggtaagacccctacggcctgtgataggtcatattcaggtgggggacagccctgaatgtgttggcaatgatgtcgacgccacagttttgggaaaagtattcagtaattgcggctccaaggaaacaacgtaagtttaatgattgacagtcgagatctagtcttttgggttggttttagtttgacacctccgtggctacatatgtgctatgtacctatatacatgtagatacatatacggagtatacctgcatcgatataaaaaaggggagagaaacatgaaccatggtactcaggagaattctatgttgctttggaagaattggaatagacatcaacttccacggttcacacaagaatctagacatcctcattgtacaattctacatcgtagacgtaagttgtagatgtttcagctcaggcgctttctgaaacatagaggccccaccacagcccgacctctggtgtcggctgtgtcgctctattaatattctctagagaagatagttacaaagatttgaactagaccctgacttgacatatatactctgtagcgaagtacgaaggactctatttcttatatggtggagtaacaggtcacctgccgcatctctcggtaacttcttactccactcgtttgttctctaccttatctctgttgcttctgcttctgcttctgcctctgcctcttctttggtctttgctgtgcctttgcatttgcttcttcttttacttctgctctgcttttcatagtatcatctgtttgcttcaatccgcctttttccccctcctcccaggactccccaaggcggactggtccaaggccgacactgtggctactctcgcagatccaaacgagttgttcttgcctggcgaaaggcaaaacaatctcgccatgtcgtctcctgttcctctccttcgtccgcccgttcctggcgctcgcaacaataccggcagcccgcgagccccgaagctcacgttaggcattcccccctcacctagcgccaaacccgtcaatggcaatcccgcccccgcccaagtacctcaaatccaaacccaaccccaacctcagcctcgcccgtcgggtcgaccagcacccccacgactgcatctcgcaacccctatgggtagccagcagaatgtatctccgccaacccttatgccgaacggtcgaccagccccgcccccactgagtacaaatggcctaggaggtggaagtggaggtgcgcccattctacaaattcagaccaatggaccagcctcttcaaacccttcatattcgacgattaatttcgccatgggacttcgacagccggatggctcgtcagatccgtcctcggctattagctcagtgtactcagatcgcgagaacggagaccgtgaacacagtgtgaacggccttctccccgatctggacaaattgagtctggagaagggccggccccttgatgtggatgatctcgatgatgaaggctggcacgcggccagtgaacagaatatgattgttgaactgggaagtctgggagagggtgctggcggagccgtcacccgatgccgactcaaggagggaaagaccgtattcgcgttgaaggtgcgttgcttcagctagtcaacttttgtatacctgcgctcggcgatagaggctaacatcccatcctagatcattactacggaccccaaccctgatgtcaagaaacaaatcgttcgtgagctcaacttcaacaaagactgcgcttcgcaccacatctgccgttactatggtgctttcatggacaaatccactggcaccatctctatcgctatggagttctgtgaaggtggaagtctggacagcatctacaaagaggtcaaaaagcttggaggtcgcactggagagaaggtccttggcaaggtcgcagaaggtgtcttgaatgggttgacctatctccacagccgaaagatcattcatcgaggtacgaaccattatccccgatatacattgaccatcagcggctaatgttttctagacatcaaaccatcgaacattctcttgtgccgcgatggcaaggtcaaactctgcgactttggcgtcagcggtgaattcggtaccaagggcgacgccaacacttttattggcacttcctactatatggccccagagcgcattactggtcaatcatatactattacatccgacgtttggtctctcggtgtgactttgctggaagtcgcgcagcaccgattccccttccctgctgacgggactgagatgcaaccccgtgcagggctaatagatctcctaacttatatcgttcgccagccaattcccacgttgaaggatgagccacaaaatggcattcgctggtcggacaacttcaaatacttcatcgaatgctggtatgtactctgtctgtgtaactctaattcttatatactaacgcgatcaccagcttggaaaaagaaccccctcgacgtgcgacgccctggcggatgctggaacatccatgggtgcaggatatgaaaaacaagaaggtcaacatgacgaactttataaggcaggtgtgggattggaaagagtaaacacgtccccaaggacccttttgagggtgccttactgctttgctgcatttcttttgagtatgagtggctggaccccaaggattgacctggctgtcaacaactcaaccccgtttctcacgactctacttcgtatctatctgcgttttgtgctttccgctggctccccccgggccggaactggcggggctcgacattactctcataccccgttaccatcagcaaatgctttttcctttttttcttcgacacgaatctcatcggctacgcttcaccttctacgatccttaatggcctgacattctccatgcattgcatacccttcaatccttttcgccctctccttcccttctcgctgtttccgtcgtctccttgcgatggactggtctctgcttttgcttcgtcttttcccgtcacatcgagcctggacatatcctccatcttcgtatatcgtgttttcgtttttagtgtacagcccgctttcttagtctgctccaggattatatttagggtctactttgctttgcactggatgcgggagtgttgcaatgcttggagacttcctttgggacatacttaggcacttaataccattgcatcttgtcttcaacttggatgattatgtatacggggacaataatatacgtcagctagtccttctgcttctaagaaaaaatatgtctcattgttatcataaaagctacatacagcacaggtctcgatatgcatcctcgtcaaccacaaaagcaactgtaagggatcccaaccttcagttactcacaaccctatattgttcgcgcctcccctacttcttgctcaccggatcagcgccaagaacccaaccaatcccactaaccaagcccccggtcatcatattgctaaccatatccctcttcctaacacgaccctcactatccggagatagcggccgagcatcatcccgaggagggagcgacgccgaactatcagctgcgctcctcagcgggaaagcattcttatgtagcgccaaagccgctccacgagcaacctcaaacagacccatcggcgcctcgtggcgacgagagttcggcactgcagcgcgcgcacggcgcgccgcgcgctgctgttccgtgtcgaaggcgtcgcgctctgagtctgacggcccgaatccgcccgggacggatgtcagtgtgtcgccctttctgtcccagagatcttcttcttgctgctcgcgcgcgcgcagcgaggtgagttcttcatcgcagcgacgccaggcgccaaggatttccgggagtgggtctggggatgggactaggacgagagcgagggagaggagttccattcgctgggagaggtgcgagatttgggattggagggttggtggcggttgggttggtgttgtggcgcggtagcgacctgcgttgtagacggcgcgccaggtgatgtcgtcagggacggaagtggtgtttaggagcggggaggaggtcgagaggagtgacgggggtgtgagtcgcgttagaatgtaggagtaggctgtgccgaagtcgttggaggatagagcagacgcaattgctagggaggttatgcggcgctctgcggcgagtaggacgtgctcctttggaggattatagtgggttggctcgtcttcggctttgtgtgatgccgcttgcgtgggaacgtctgctgccactaggtttcgtccgatggagagaagatcgtctagtttggtgtagctctttgggttttgctccagtactttctcaatcaagaggattggatcgtgatggacacgaatgctaacaggctggaatggaacaccgtgttgcagggtcagcgaatagtatgacagcgagtgggttgcggcgatgagggcgtggatctttttgaatgcaacagattctgggaagtgtgatgtgaatgattgtaagctaatttactgtcagtgctgagtccatacatcttcttttagtagcaccacatacatatcataagctctcttcattccgccccgtgttcgatttccgttgcttgcattatcataggctgtaaatatagcctcttgaaccgcagcttccacttggacaggattcagtggcgctggtttagactcggtgtatatatcgagcgccaattgatactctagaaatgccatcagtattgacaatgaatagtgaatttggatcgcattacctttagctgccagcagcgccttcaagatctccgtttcaaccgtgtcgcggggaatccgccagaaaattccatggtacggtgaaggttcatcccaggcgttgtcggactgttccacctgccaatctcggagccaaagcaatcgttgtcgaaccatagaccagtcttggtttaaacccggttgctgcaaagtagaattcaccacgcttttgagttcggccaattgcatttcctcggtgctgtgaaggcacatatttgccgcaacccggcagggaaccagatgaccaagttcggtcagtatacgaagggagagaagtaaagcgctaagaaacgatatcgctgggggcgatggcttggtaagaggattcgtccgtctcaaaagagagttctgcaatagagatgcgcgggatgtcgaggagattgactcggtatcatagtgcacagatggcagttctgaatcaggggtgaggtatgagctgtcttcgagaccgaggagcttcgcaaccctcgtcaagacctggaacgagccatccagcacagccgtcgatgagtttgcatgggcatacaccacagcaagacccgactggccgtatcgaacctgtaaatctctcgcctgctcttcggaatattgcgctccagcattgtcatatccccccaagtccacatctgatggtccatcccagtggttgaaggcgctcacaacgctgtcgcggtcgacaagactccgcgatagtagccattcattcacatgttcccatccagccaattcagttgcttgaggtctctcggagccttcaatgaaagataccgaactctgctgagcttcttcgttaagccttcgccgttttgaccgattaccaccatagagccaaggtccaatcagacccttcaagttgttgaccaaatccatattgttctcttcggagctcatcagagacaggagaatgttgactgcggtttgatcgtccatagactccaagatctcaagagatatagtttcgtcccgataggcgtagaattcgtagttcagtcgaagtaatggtaataggctcgatatcagccatgttcgaatgattggcgagtgctcgtagaaggggacgataagatcgagaatgagaggctgtagcgctgtttccgagtcgatcagatgtgcccggtggataaggaatttggtcaaaggatctgctgaagctatctcggcttcctcatcagggcgttgtagtggccgtaaatgaagcttccgcacgcgctttctggcgagcgattcggacaaatcctggacagcagatgtattaattggtcggtcggattgaaaattagagctatttgctagctcttgtagcactgaggtgtactgagagggctctgtgctctctgggagaaaggtcaagatgatgcgcaggaggcgttccaacggaaaacaatggggaaaccgggcctgtagaataggcaagtccgccacattaccacctgcgcagagttctgtagctagtagaatagcatgtacatcggacagctcttcgagagccatggtcaagctaaagagacgaggcagtcgagtgaggtggcctcatagttggcgatgaccatgttgcatacggcggggcgcacagaccaagtcggaaatgaaagggaagaggtcgcatccgccggcacttcatcactacctttttcgcggtctctgtgcctacaacttactcaattctcttcttatacgtatcacaatggcttccggttacggtaacagcggtggtatgtgctcatttcccccatccccggggaacctggtcgggtccgcgccaatatgccctcggatcacaacttgcgcacgcagttccctcccccgcgaataaaactggctaacacatgatggtttctcctaggtcccggacgctgctatcccttctggcaagaggttcttggttgctacgttgtgaactcggacgatggtgccaccggcaagaagaagtgtatgcccgccctggaggactactatgagtgccttcaccaccggaaagaggtaagggcaatccccattcgatcacgatacctgcacacttgaatcatggacctagctctaataatggggaaattggaacaacaggctctccgcactatgaagatgcaagctgcctatcgcaaggccgaggccgcacacccgcgagagaacgcccctaaggctgagcaaatccggagcttgggtctacttggaaaggaagaagaggcagccaatgtgttgagttaacggtgaatgggaaggatgtgcttgttctttttcgatgcgtgtgtttccgtgtttccgccccgggacttttgcccggggcctgtgactgtatagaaccgctcaactggttgattatcacgtctgtcagtgcgaaatgatactccaattcaacgacaaacggtgctttatcctaaattttgatgcgctcgatctttggatttcggtaatgcgagatgctgccatgtaggacgagatatgcctgatctcggaagtttaattaacgagataagcatgtattttgattgggcgcaggaaattaactcgaattaccagctccagccgtctagccgcttatcccggggttctttgtgtcgctagctttctctctgtatcaaggaattatactttgattatatgatacgataagcccatgaccgtctttataagaaggatgtaagctcataggtatgttctgtatgcttggcttaggggaaagtaagagaataacagaagtggacgagaatctacggagtatatagcggatatatagttcggcaggacgatcgatatatctgcatagcagcaaaattcgattgacatcttatcctttatatataggtacagaaaagcatcacttcttataccatgatctgatcacttatttttcagctatcataaaactatcacatacatcagtgtatgtacacgcactgctacattcgtaatcttggacattgaagaggccatctggcatgtcttggcgttgctccttccttcaaagcatagacgaaatctcaaataaaccttgacttgaattatccaccgaagttcgctccatcacaacagcccccagacattgaaataggtatttctgaccaatctaaatgctctatgtcatccaacgcgttttatggactcacgtgaccctttcagcagcagaaaaaaaaatcggcgcgctgtgagtggaagcccaccgcccgcgctaaaccacaaacagcctaggcggagtgacccaaacatggaccagcgcgccgggcagaagcacccgcaatgatataaacccggctgcgtgacctcgaccctcgctcttgtgtactaaatctaaatccccccgctgactcatcatcgcggcttgaggtgttaggcgttcggtctttctttttccatatcgaggtccttccaccttaatttcgcgccccgctccgcgnnnnnnnnnnnnnnnnnnnnnnnnnnnnnnnnnnnnnnnnnnnnnnnnnnnnnnnnnnnnnnnnnnnnnnnnnnnnnnnnnnnnnnnnnnnnnnnnnnnnnnnnnnnnnnnnnnnnnnnnnnnnaccttatttgcgcgcttcgtcgcgcgcaattgttcttttcctcgtgttgttctcttttttttctcttattcaaattgtcccgcatagtcggaagaaaagcgaagacccacgatggcttcccggtaagccccttcagccagttaccacgcgcctgtcacgtgaagctaacctaattcagactcgaccgtctcgtcacgtgagtataatggcccccaatatgtgagatcacgtgaagcaactgaccactgaccaatggcaatacaggctactcgagacgggcagtactcagttgattcgtaatactgctgctcagcagcttgcagatgtgcagaaacagcatccagatgaactgttcaatctactcgggcgcatcctgccttacctcagatccaagtcctgggacacaaggactgcttctgctaaagctattggattgattgtctccaacgcagatatttatgatccaaacgaggacgatggactccagatcaagtctgcagcagacgaagatgatgtggagatcaagtccgaggtcaaatccgaagagctagtcctggccgatgatttcctcaaactcgacaccttggacatcccttccgtattgaaatatggtaagcggctgctcggaagtgcgggcaaggagtatgagtactccctcgcgtccatggaaccagcttcacgtctacagcaccaaaagaagactttgactgcgcgcctaggactcgaaggcgaatacctagaagaagaccttatcgaggatatcgatctgcctcctaaagttgtaacccctgccctaaagaatgagccgactattccgtcgatctctcatcacaacagtcggcatgaagctcgctcccgcatgccttcctcgcctagtgaaagtgcgacaaaggaggacggggggctgagcaagcggcagctcaatcagcttaaacggaaaaacaagcagaatgccaagatgggggccaataaagtccgtgtcgtggatctgtcttctcgtcgacaatccgatattgccacgacccctatggccacaactccccaccctgtcaaagcagagaacggagataatcaagacggcgaccccaaacctgattacttttccttcgaacgcaccgaagaagatgacgactccaagcttgtttctgagttcaaaggagctgtcatcccagagcgacctcttatccaaccagagattgtggagcagggtgcaggatggcctctggaacacatgtgtgaattcctgactatggacatctttgactccaactgggaagttcgacatggcgccgcaatggccctgcgtgaagtcatcagggtccagggtgtggcagctggccgcctggatggaaaaagtcgcccagaaaacgatgcactcaatcgccggtggctggatgacctctcatgtcgactactctgcgtcctgatgctggaccgatttggtgattacatttcagataatgtggttgccccaattcgtgaaaccgtgggtcagactctcggtgctcttctttcacacctacatccgaactcagtccgcgcagtctaccgatgcctataccggatcataatgcagaccgacctgggactgaaccgccctgtctgggaggtctgccatggtggtatgatcgggatgcggtaccttgtcgcagttcgaaaggacttgcttgtcaaggactccaacatgatggatggcgttttggaagctgtcatgaaaggcctcgctgattatgatgacgatgtccgggctgttagcgccgccacactcgttcccattgcagaggagtttgtgtcctcccggactggcactcttggccctctgatgaacatcgtttgggactgtctttccaatctgcaggacgatctaagtgctagtacaggctctgtaatggaccttttggcaaaactttgcacattccctcaagttctggatgctatgaaggctaacgctgcagacgatccggaagcgtcatttggaaaacttgtcccccgcctctacccattcctccgccataccatcacgagtgttcgctcggctgtccttcgggctctcatgacattcttgaagctagagggtgagggcactacagactgggtcgatggcaaggcattgcgcttaatcttccaaaatcttcttgtggagcgaaacgagggtgttttgaaactgtctggtcaagtgtggtccgaactcctcaacgttgttgagctgcgcggttcgttcaaatctgaagaggagttatcggactccatccagcctcttgtcactctgactctgggcgcttttggcgttcctcggtaccctatccctatgaacacctcgctctttatcaaaccctctggtttgccattctccgccgctctcccggctcccatcccccccaaaggctctccccctgcttctatcccaggcggggctgagatcaaggtgggacggagacgcaaatcagagaagaaagagaaagaaccacccccgccctcagctcacaacgtggacggacacatgctttctggtgatattgacctcgttggtgcagatactatgttgagatccaagatttacgctgccaaggcgttgggcgagctgatatctttctgggacaagaatgagctaccaagcctttggccggcaattttggatggtcttaatgtttctgcttccacaacgcagcttgcctcggccatggtcatagaagagtatgctcgccaatctggactagagagcaaatatcgctcgtcactgtgtgaccgtcttcgaccgattctcgagggcgagcgtccagcttggtatgcagacattgcgtgttaccttcatgtcgcgcgctcccagtgtcattcattgttgaacactttccgggatcatgcgcatgtggcaccttcccgactgccaaccttggctgtggtcgttcagggcgacccagaagccggacctaatgcattttccttggcggacgctgagaaaattgttggtcctgactttgatcgactgaagaaaaacctcacaccggctcaacgaatcactgctacccaagttttgaacgacacccgtacaaccgcacaatccgccgttgaggaggcacgattgatgagggaacagcgggacatgcgtgttttagctgccactgctggtgccttggtcgcgttgcgggatatccccaagaagcctggtcatatcatcaagggcatgatggacagtgtcaagaaagaggagaatttagaacttcagcagcggtctgcgacagcagtggcaggcctcatcgaacactacacagccgccacgaagcgtgggccagtggacaaaatcattggaaacttggtcaaatactgctgcgtggacacttccgagacacccgaattcccgcacaatgtgcacttggagaaatcaatcttgtcgctacgcaaagaagaagaccgacgcgaccatccagatgcggccaaattcgaaagagaggcaagagaggcacggattatgcgtcgtggtgctaaggatgcgctggagcagctggcagtcaagtttggcgctgagcttttggagaaggttccgaatctcgcgaaattggttgaacggccattgaaagatgctttgacagaagatgatcttcctgagaacatcaccgacccagagaatccacttggtcaagaaattgtagatggtctttctacactgcgggctctactgcccaagtttgatccgggtctgcaccaatgggttatcgaccttatgccgatcatcgccaagggtttgcagtgccgactttctgtcattcgctacgcagcagccaaatgtttcgctacaatttgtagtgtcatcaccgtcaagggcatgacgatgctggtcgaaaaggtcctaccaattatcaacaatgggctagatgtcaatcaccgccaaggtgcgattgaatgcatctatcatctgatccatgttatggaagatggaattctgccctatgtcatcttcttggtcgttcctgtccttggccgaatgagcgactccgacaacgatgtgcgtcttctagcaacaacctcattcgccacccttgtcaaactggttcccctggaggccggtattcccgacccccctggcttctcagaagagctgctagctggccgagaccgagagaggaagtttatgtcccagatgctggacgtgcgtaaggtcgagccattcgaaatcccagtcgctatcaaggctgagctccgaccttaccagcaggatggtgtcaattggcttgctttcctcaatcgctacaatctccatggtattctttgcgacgacatgggtctcggcaagacgcttcagaccatttgcatcgtggcaagcgaccaccatatgcgggcagaggagttcgccaagagccaatcgacggactcccgaaaactgccttctttgattgtctgtccgccttctctctctggacattggcagcaggaagtcaagcagtatgctccattcctcagttgcattgcatatgtcggccctcctgcggaacggactagacttcagccccttctggccactacagatgtcattgtaacttcttacgatgtttgccgcaatgacaatgatattctctcccctatgaacttcaactactgtgtgcttgacgagggccatcttattaagaaccccaaggccaagatcacgtcttcagtcaaaaagttagccagcaatcaccgtttgatcttgtctggtaccccgatccaaaacaacgtcctcgaattgtggtcgctgtttgatttcttgatgcccggtttcttgggaaccgagaaggtcttcttggatcggtttgccaagcccattgcagcgagccgtttcagcaaatcctcttccaaggaacaagaggcaggtgctttagcaatcgaggcactgcataaacaggtcctgccattcctactccgtcgtctgaaagaggaagtcttgaatgacctccctcccaagattatccagaactactactgtgatccgagtgaactgcagaagaaactcttcgaggacttctctaagaaggagcagaaggagttggcagataaggtgggcagcgcggaccgtggcgacaaagaacatatcttccaggcgcttcaatacatgcgacgtctatgtaattctcctgccttggttgtcaaggaaggccacaagcagtacaacgaggtgcaaagcttcctgacggccaagcgttcgaacatcagagatatttcccacgcgcccaagctaactgccctgaaagacttgctggtggattgcggcattggccttgaccacacagcagagggtgaactggatacaggcgcaagctatgtcagcccccaccgagctcttgtgttctgtcagatgaaggagatgttggacattgtgcagaatgatgttcttaagaaactcctcccatccgttcaataccttcgcttggatgggagtgtggaagcaaccaagcgccaggatatcgttaaccggttcaacaccgaccccagttatgatgtcttactcctgaccactagtgttggtggtttgggtctcaaccttacgggtgcagataccgtcatcttcgtggagcacgactggaacccacagaaagatatccaagctatggaccgtgctcatcgtatcggccaaaagaaggttgtcaacgtgtaccgcctgatcacacgtggtaccctagaggagaagatcctgaagtaagtcactactatcccacaagaaccccgcagatgcacaaagactaacgtgatccccgccacagtctacaacgattcaagatcgacgtcgcctctaccgtggtcaatcaacagaacgctgggctcggaacaatggacacagaccaactacttgacctgttcaatctcggcgaaacggcagacacagccgagaagccaggcgacccagccggcaacgaagtcgatatggttgatattgacggcgaagtcaaggagaagggcaagaagggctggctagacgatctgggcgaactctgggatgaccgccagtaccaggaagaatataacctggattcgttcctggaaaccatgaaaaactgataaatactgcgccgcccatccccgattcgaagcttatcccagcctagactcgatgtctgcttcgctttttttgcatctcagatgcatatctacccatcttccgctcccctgcgtctgattcacgttttcacatctcttcgactcaaccctcccccaaaactcccccatatcctcacaaccccaaatgattgtcatgcttaatgtcactgtaccattctccgtcctataccatggaaacttttgtctgcacggcagaccggagcataatcgcttattcattagttctaccgctgggaaggccctctgatttctgctcgttctttctattcttcttcgaacccttcatgtattgctagcttctttgatctctccccacaatggatggagagtctaattcctgtatgtgtacatagcaagtcctttattcttccccaacattgatatcttttttttttttgaaaagtcaaaaacggcgtaaactagcggattgttcactcgtcattggacatggataggatgcacacaactgacgatacttgactgcacggttttgatttggaatcttcattgaaaaatacatacacaaaaacaaaacaccatagcacctttccaatggcaatgataatagcccgaaagcatagctgcgaacgccgtatttcccaaaaaatgttgaccggagacagaggtggaagacaggaagaaaaactaacaccagccacgaaaagaaaatattccgcgaggtggggaggctccgaagaccctcaaaaatgatagtgtagatacaaatcaagaatggaaatgttgatacgttgacaccgcagaagaacattactgcagcgtgggctggactgcaagggtccagaaggcggaaaacaagatatcaacaaaaacaaaaaaataaaaaaataaaaaaaccaggtattaggttgatcataaggctgaaaaacaattcatcagacgcggcctaaaccgccaggtatgtgctcgtcagctcattccatgtttaagcctgtcccttcggcttcgaaagcatgttgaggcggctcatgctgagaacaccgcgactcttcttgctagctggagtaccgatttggccagaaggacgcacaggagtcttcgtaaggcgtttcttcaccggacttggagtaggcgggttagacttgaacctcttggtgctgcgctcatcggactgcatatcggcaggcggcacattttcacgatctgcagtgttgggagcatcctcatcgttgacttcactgcggtgtctcttcttattaagaatgccgtgagcaatgccatgagtcagcaccggaagctcttgatatggagcgggttgttcaccggcattcgatttgcgaacacgacgaatggacttgaattcggaagtaggagtagtggaagttgagacagccgagttcttctcgggagtgagggccgggagagtggggtagaccacaaccccgggcatggaccgaagctgagcggaagagaccttggaaggagagggtgaggcgatagcaagttcgtgacgagacttaacacttggagtgaattcaacgtgcttctttggcgaaggggttggcgcggagtcactcacatcaccagctcctccaaatagcgacttggggttgaagtcgggcgctgcaatgtgggtgccagaagcaattttggcagggtcgcgggagaagaggggttggcgccgacgaagaatagatctaaggctaccaagagtgggcaatttacttttgaggcgtgggttgaaatcagtgcgaggggttcgaggtgaggccatcgttttggcggccggagacaaattcaaagatggaatcattgaggttctcggcgccttgatgctggtagaggtcgtacgagcaagcgaagcatgtgtgggagtcatgatggaactgcgaacgtttgtgcgagggcgagggcgaggacctgcaggtcgacggggggtttcgaccttttgtgtttgatcttttgattcatgactagtggatttatcttcgatttggttgtgcttgacacgcttggatgctgtagcagccgtgggagtggacaattttgagatcttagtggcagggcgagaaggggacgagttctggctctctggttcgtcaagctgcgctttggacttggaccgcttcagggacttggtaacaggctggaagcgaccaggggtagcacggaaagatgaagcatgtccggcaatggagtccatctttctgaattccgccatgtggatgtcgctgaaacggttggccctgccctttggcatggcaatcttccggtccccatgaattttctcggccttgtgatcttcacagtcttgctctgagttgctctgaaccatttgcgccttgattcgagccgcgtcagcacgaaggctttccatcagcagtttggcctcttcgctgagttccgtctcctgggattgaaacttgtactcgaaccctggggttccgaactggtcgatcgcgggagacgccttggatttggtcggggtgttgtcgctgatgccgtgcttgactatattgccattggcatctttcttgatgggattgaatccgaggagcaggcctgagtctgcatgtttagttgtgctctgttgggctttgctgggatgcatttcttcgcgggacggacgagccgcagtcacactagtaggggtcctcatactagcgcgctttcgttgagcggacgcccgaggagttttcgcaatgggagtttggatgcgtgggagttcggggtcgtcaatctcttcgccttcggcaacagagtgaagtctggaagctgcgactggctgagtggtcatgtcttcaacctgaaagaaaaaaaaacaattgaagttagtttaccgcgatttcgacgatcatcaggaccttaatctgtcccacagcaggcgtcactatgctactcacctccggggtgttctggcgacgaatgcgagcggaacggcggatcgccatgactgaagacgtgaatgcaaggaatcaacaaatatcaatagaatgcaatagccccaagaagcagtgcagggggtaaatgggtcgagacagggtgtgggggaagcatcaaagtcgaagcgaggccaaaatgtaaacaacgcgcttgacgtcagatgactcagctcagcatcgtcctgacctcgggagcaacctttgtactacggaatacaaactatcgctaactacacattctcgctcgcatattattctccttaagaagtcttttatattgatttagttaactaccatttatcttaatcctcctagatgaatactaatacagtttcatcttgttccaatagtaaaaatacatagcaaatccttccaaaaatcgtagaagatgccacagtgactatcaaaagctggctaaacttcttgtcacaatatagaaaaaacaaagttaagcatggtttccatgcaagtgctcacgcaagtgctggcgccagtgctcatgaatgtgcctctcggtatcttgagtagcggtggtctcctgcgtagcagcctcttgagtagtagtggtgtattgcgtagtggtggtgtattgtgtagcggcggtctcttgagtagcggtggtctctgacgtagcgacagcctcctgaggagcagtggtctcttgagtagcgggggcctcctgagtagtagtggtctctggcgtagcggcggcctcttgagtagcggtggtctcctgcgtagcgacagcctcctgaggagcagtggtctcttgagtagcggaggcctcctgagtagcagtggtctcttgagtagcggcggcgttctgggtagcggcctcagcttcctggccccatccagtgggcgggttattgccgggcaatttctcaagaacaccgtcaatctgctcggggactaggttgggaatgttgcatgtagttgaggcgtcattgatgaaaccagcatcagcgcacttgtccattccagaatccccagcatcacagttatcaatgatcttctgcaagaccgattcatcccagccagcgatctatattcgtattagccagtagtcccagacatatcatcctgtaatgcaaatagatatactcacaaagtcaccatgaagcgaataccccgtccgatcgccgttactgagaatgaaaggctgcgagccggtaccctgggtccacatatcggcaaacagcggtgtgttccaatacacctcgtagaagatatggggaacgtggatccaaccctgtggacagttcgccttgccaccagtggtacccttgctactagggaataccatgtttgtcttgtagtcatcaagcccagcctcaggattgtagcacgaggggaaatggatatcggcacgcaggggcgacgcatagccatcgcagttcatatccgggaagccagcgccagcaccggcattgtttggatcttgaataccgacaccgtggagtccatccgaatccggtgggtaggaaggcacatcgtaagaagagcgggggcatgtgaactggacaggttggatagttccctggttcgtgtcgaggacattggcggcaccgcctgggggtggtgtacgtagggagctgttaccgatgaacatgcgcagaccgacagggaaagctttgatctcgtcgtcggttggctcgaagaagtagtagacattcatgtagaacatcgggaccgagaggaagctaccattatcggcttggaagtatagcgacggagtccagtagttgctcttgtcggcatcgacgagggatgaggtgcagttggagtccagcagggcatcgtctgtcatggtgaggttgaaattgcttcctccctggatggcgtgcgagtgtgaagccgcctctccggggttcataatcggatccatacgacccattgtcaggggaccattgccatagaaatggttcacggcaaaggtacgcgagtcttttgcgagtgctaactcgaagaagaccgcggaggtcacgagagtgcacaaggccttgacgtgcattttggaagtatatcggaagaatcggttgaaatagcaatatgcagcaacgagaaggatgcctcagaattaagtagaaatgaacggcggctgctcaagtaccggactcgaggtaaaagaatggaatgatgtttggaactcaacaaaaagaggaagggccattgttatataccagggagaatcgttctcatagaatatcctcgtcaattcgttctcgtcaatcgttctcgtataatcgttttcgttctcggtggggagtttcttcgatagttaatggagaatcagggtccaggccaaggactccacatggtgtcaataggtgattagacgccttgttaattgtgtagaaggtaatgggtgtaataagatgaggagggtgtttcagggtagagtgttttgaaacgtggggctacgccttagggcacatacagttacctaaaggggattggcggagaggatgataaatcaaatcccagactcctgggaatcgtcaatttccacatgtacttttcacatgcataacttttgtgacacatcatatgattagagtggttgctaaatacggtggatttgaggctattcccggaaagtgtacctgtcatccctttccatatacttcgtttagtaaatcacacagacagtaggcgtagtacggagtggtagtatgtagaattcattgatactaatcccccgtgaacattatatacactcatgttacagtttcaccactttgcccttatcaattctttcccccttattgaaaacagactagtctttatccgcgttaactctccggagattaaaaggatgtttaggaagaagactaggcattaaggtagtccactagttaatttaatatggatatccggtgcaatgctatccggtgaaatccggtgtccttggtgggcttgctagtttgccacgatattagtatctttgctagctctcctttctcaaggaatccacatattgttttcttaaagatgcccacaatgtactccgtagcattcctagggatacacccaagacacatgttcaggagtaaaacctccagtaaatattattcaagagacaaattatagttctgattcttgttgcaggaaataaatacaacgaagaaataaagtctggtagcgagcaactctgtaggccaatgccaagaccttcagcctcgagtcactcccgacgtctcttcaattcaactcctgactactcgctgcttagggtggcatcatgaaataataatgagccccgatggaagaaagagaaacaatgtggcacttgactctcaccctagagtaaaaagggggagaaaaacaacttcctgttcccaatgtcacgccaggaagcaaaaatgtaacagagaactgccttgctctcgttgtattcaacgcggggttcctcaactatgtcaatggccagagaaggaaaagtgccatgcgatgccaccagaaagagtgagcactgcaggtaccggatatccccgcctcaaaaacgtagatcatggctaaccatatagcagatacccagggcacagaactggggcagttgtatattgcccggggagcacctagcttcttcggtaattcatactttggccaccaggtggcagcccgcatgattcaggagtcagcccccgatctgcccccgatgagtttgctgtctagcaaggattctttgcaatcgtttcggaatgactctgggcccttttcacaagtgtgggatttacttggtctattaccgcggaataaagtaaccgtggatcgactaatcgagaaattcctgaccgagatcaactgggttatcgacacagttcaccccgaaaccttcagatctcaatttgcagagttctggggccaaaaatttggattcgacgaaattgctggagtagatcttcgctggctcgctcttttgtttattattctcgcttttagcgtgctcttggacaaccctactacttcttcgcccgaaaagcggaaagaatgcgaagaagcctctcttcgtttctactgggctgccaggagagcgatcgttatctcaccctcctttcacggcgagagcttagatcttgtcagggcagggttgatggttacgcgatatctgttatacaccagacaagtcgcagagagctggctcaccatcagctttgccatgcgcatggcccaagcacaaggcatgcatatagatggagaaaaatgggggctatcgagaaaagccactgaaactagaagacgtctttggagcaatctgtacttgcttgacaagactattgccctcgctctcggcagaccatacgcgatctcggatcatatgtgtctcatcaaagcccctgataatatatggctggatgggatgtctgatgaagagtcctctcttgctacccctcgtccattgagctatcctacgatgagcacagtgacactcctcggcagtggcttaggtaaaatcgccggtgaaatccaagaccgatgctttggtttatattctgcatcgtacgatacggtgattgagatggacaacaagcttgttgcatggaaagagcaactcccgtcctactttgccgtggaagaccccgagctttcactggatgagtcacatacatttctaccttggcatcgcctctacctgcactctgctttccactttgccagaatcactctgcacagaccttatcttctgcgcgagtccatgaccaatcgcttcagccttagtcacgaggcatgcatctcctcggcatcttccgatctgaagatccgattgcagtctttgaactatggaacatcagaaaatatgagatggacactaggcacccacaatatgttcaacagtgccttcatcctgggcattatcgctgtgcggcgacccattgctcctcaaaccgcggcaatcttgaacgatcttgaggaatattgcgaaaggttacggaaggatgtttggctaaacgagtttggtcttgcggaggtcaaagtggtagagttgtgtataatccgtaccactggacttgcccaagttaccgaccagccaggtgatcaagcctcaatgagtccacctgaagtaatgccagactttatggctcaggagcgcgaaaggaatccaatgatgtcgacgcccatgaacattgagtccattgcagcgggtacctcggccaatcaaccacctggttcttcgcctgatatgatgtggcctgcagtatgggaagatcagaactttgcatttccacaggctgctgatcttgaaacttgggagcaaatgatctccgaaattgcatatcacacctagcatatggaatttcttggggtcatttttgttgtacaagcatttgtcgatatatattctcggtttttatgacggatgtagcatctcagaaattatatgacttgatctcaatattcggtagtataaaacacattcacaggatatagcggaaatcgggatggaaatccccgcctttcttttcgtatgaccccgagctgacaatgcgctccctctcctccggtgacagttggtctcgcttcttgttgtgatatcggagcaaagcccacatactagcattgccacagaaagcaagacagatagcagcaagggaaacagaatgaccaaccacatatcgtccatttatcgatgacttgtaaatttgaccagccttgagttatgttagcttcaggtcaatgccacaaaacgagcacgccaatatgatattccactcacaatcaaaccggcgcaatttccgatagtctgctgtaggcctactcccatggcacgcttgtagtagccggaatggctgttggcattccaactgaccccaagtccaaccacagcatagattctagaagaaaggttagtaattactcgacagatactccaacggaaaatacatacccagtaacacacacatatgtcgcaaaatagagcacacctcgtttatggacatccactcccagcagcatggcatagccaatagccgtcactagacacagggggaccatgaagatagctcgcatgcgcactcggtcggagagatttgcaatgaccaggtaaaacgcggaggcccagatatacacaggaacagtgagcagttgggtcttgaccgaatcaaacccaaaccctcggatgatagtaggcaaaaaggtactgaacccgaaggagcagatattgacacagatttggttgaacgaggtgagccagctcttggggtctttgagtgtcttccacacttccttgaaatcaaactcttcagtatcagcataccgtgctgactgttgcatgcgcatgcgcatcagctctttctcttcttcgttcaaaaagtaggcagtttcgtagttatttggaaggaggaagaacgtggcaatgctaatgaccgcgctcatgatgccctccacaatgaaaagccacctccaaccttcaaggccgcacgcaccatctaggcgaatcagtccaaaggcgagtctaatgttcatgttagccattgttgttcggatttgtttggcagaatagggagagttgcgcatacaatccaccaaagcctccactcagagcagcagacacaaacagatatgaaattctctgtgcttgttcctcgcgcttgtaaaaggtagtcaacaggacggtcaagcaactgcacagtaattagcttccatccaaaacagatttttatcaaggcaatcgatagtctcacgggaatagaccactctcaaagacaccgaggaaaagtctggtgatataaagcccggcgacattcttgataaatccagcagacaatatggatgcactgaagccaaggatcaatgcagaaatgagtctgtttgggcgtaatttcttgaggagcatagagaacgggatctcaaagaagacgtaggtcgcgtagaacaaagacacggcatctgggtattgttagctatagcttggaatattggacgagggtaatctcacttcctagttcatttccaactaaaccaagatcttcctgtaagagctaagtcagtaacccactgcttcacaaaacgtggactcgaccttaccggcatgccagcaacagctgcatttctagccaggagttagcgataggaaccctcgctgcatagaggaagaacttaccccaagttgcttcgatcaagatatgcaaccaagaaaatgagcatcaccaaaggacaaatgcagagatcaagcttccatagcagctttctctctcggatagggtcaactacgaagttgcccatctgcacatcgtgatccgaggatagatcagcttgtttgatatccatctccttgttcatcttgaatgagtatgtagattgaccgtatacagaatccatccctatcggttcttatatatggaagttgtcacaagcgttatcaatgatcgggaaatccttcggtttattcaagcactcgacgaaagtaagacgaagaatttcccgaacattttaggtggccatgaccaattaagtttggtgtcatggcgagagataagctccagggctggaccaaggcttttcgtgcattagttcgtcccatcggggcactttaaccttaaaactttaccataatcgcgcatatacctaggtatatctcacctttcctgaattatcactttttaactgcctccgacgtttcaatgatttcccacatggcttacaatcttgcccaggggtatattagctaatcgctatcttttaccgacagggatttccccgcgttttatcgtcttggcgtcggcaattgtgaactctaatttatcttatcttccaatttcccgatcaatttcccgacgcgaggtatggggagactgcccattgataaggagacaaagcacactcgcactttttgccattcagaaatattttatattgcctatctctcgaaatgggaatttcgaacatgaacggaaccgagttcacagaaaccccagcaaaacatccagtaagtgctttgccaagaccattactatgttggagtgatctaatgtgctataggtttggaagcgatgggttcgcttcagagctgaagatggtaaaatatatggtggggagccggtgaatccggatattgatggtatggcatactctcaagttcatgaaagctcaacccctactgacagactcatagtgggtcaggctatagaaaagaatgccgaagtaccagtcaaagtcgtggctggtaactcagcattcgattatgatgctttgttcacgggtgaaatcaaaaccattgatgaactgctatccccggtctcgcaaattgaagctggggctgttcggtgcatcggcttaaactacaaggagcacgcagccgagatgaagctgactcttccaaacacgccaacgttagtatatctgcccttgcctctaacacttgctgataccgtccagggtgtttctgaaggccagcacttgcattgcatctgcatgcgaaccgattgtacttccttccaacgtggattacgatgaagcggactatgaagttgagttggcgatagtcatcggcagaaaatgcaaaaatgtttcggtctccgaagcagtccactatattctgggttatgcagtcgccaatgatgtgacagcccgcaagcatcaagagaagacatcacagtggtcttatgcaaaggggatggtatgtcgatatagtcaatgtccaagatgaacttcacaactaacctctagcaggatgggttttgcccactcggtccatgtatcgtatctacagaacaaatcccgaatcctgcagtcttgaacttgaagacccgtctcaatggaaagatcatgcagaatgaatccgccgatgacatgatcttcaacgtgccagaaattgtgtcctatgtttctcaggtacataatgacatcatctcttttacgcagatataactaactcaagtattagggccacacattactacccgggaccgtcatcatcaccggaacgccgtgtggcattggtatctcacagagcccaccacaattcctccagcctggagatgagctgcgaataagcataagtcatgggttaggcactcaaatatgcccgattgtgagagattgagcattgcatcaatcatatgtttttgatccgaaggtgattgcaggaatgaagtcgtcgtgttacgtactttgaattgggtatggtttcttatattttgtaaagaaaggcagcattatattaggctcatctacgaaattgtagcaattcatgaaggcatatttcaccaagtgattcaagctgaaggtgtcgataaatagataaagacatttcctggggagcaggatcctagaccaacgctgtgcctatcccataattgtttccaaattcaaatccatcataatatccaaccagaactcttctacaccagagtccgcacggtcccaagtctcgtgcacaacgttaacaatccgttgcattggcagctttggtaagattaaaataagttcagacaaccgcattttaacctttcgtctggcctgggcaatttcaacgtccagcgtattcagactggtaattgaatttcctgtggcgcccagaacagacccagacgagaaaacaagatcgctagagatgcaagctaaaactacgggctgcagaaccttcgttccagatgttgaaggaagctgccccaaaagggatacaatgtgcaatgccagggtgtgtcgtgtgtcttccaccgaacacgacgaccattcggtagctattggaaacaacaacaaaaagagggccgggataggactttccccatctgtggtttgattacttcgtagtcgttcttcaaggatgtccgggaaaacatggtaaatttgtaatagtgccgtacagcgatatgcctcggctaacgtaagaaaatgagacgggggcgtgttcgtatcaccgatatcgacaggcccacaatagaacgagaagccagtgaagagaattttgtcctcaagatgttcggctttctgtctgagatcgagttcctcggccatggagctcaagtcaatcaaggtgggatccaaggcctctggccttcggcggtgggaggttcttgcggctcgaattactctcgcagtccgataaaagaggctcaatgcatatctgaaagaccctgtccacgggtgtggtaggatctgcccatcgacaagatagactgaaagatctgtgtcgctgttttctatagagctttccacgtctataataggcgactcctctgccacaaaggcagctagtaagttccaccaaaggaggcactgtttgaaaagtggatgttgttttgcgagggcagaatttgcattcttgcactggcgttcttgtcgcataagatggtcttgggccgctctcagatatggcagccccaaatcagaagcatcgtgccacccagtggtggaaccaatcatgagcagtgcgaggaagtactcatcatcctttgcctgagctgaacttttttgagcactagtattcagacacgcaattgcttgctgttgtgtctgtattccaattggtcgcatgttgggaaaatcgttggccaacgaggcagctgacatgctctggatggcgaagtaaatcgccgcatttcgactccaaagccgactcacaatagttcgaaaaggattgaggggacagtcgaaagatgaccattggttacagactgtatgaaagtaatattgcaccaacattactggtagttggatgagaaaagaggggacggatgtgttgaccagtcgttgacgcaaaaccgacaacccatctagttcggcatcaggattcgttaagcccgtatcattagatcgcagctcagtgtagaaccaggcatctgttggctcatcaaaatccggcagctgatcaaagaggtttgagcaggtcgtatcccatatactcggggttccattttgaagattgtctctttcatcctgtgttggattgttcacttcgaaaagttcggtcgcaaccgtttcgggagattcaatctgtgcagctggctgttttggctcttcgctgcctttgaaaacatatcgccactgcaagctctgcttttggtaaccggggcatgtgtgtcctcgcttggtgcattcctgacaacttggctttgcctcgtcacatctgcgctggataagtattactatatgaaatttcaagaggccttcgtaggtgaaggataaattgtgttggtaagaaaatctttcacctcgacttactcgccgttgcttgcacctttggcagcccccttttgactttggtcggcaccggttgggattctgccttttcttctgcggagttgatttctctgtattttccattctacgcaaagcaaagttattgggaatgttcttcgctgagagagggggaaacatcaggctgagatatcggggcatcggatgagaagccgatcaaaggatttgaagaccggtgcatgaaccgagatccgatcacctgccgataagcaacgcctcatctctgctgatattcctcccgatttgattgaagctgaattgttgaggttgtctaagtgataactatttccccgcaccttccttttgctctactctaaaaaaggatcagcaacacgcggtttccttcccttaatgcgaactagcgcctcctctatatagcatacgtgttgatcagcgtgtcaagcatttgcagcaaggaatttctcattcggggaatatcttgaccttcgggtcatcagcccctgagttggcccggagagatgtatgccacaggtcatatatgtagctttcacttcaatgacatcaagtacaagtgctttaagacacaacttgcatataaggggtatgtgtatgtgcatatgcatatgctggagttgatatgatagagatttcaaaaaacacggcatattctgacacaatgcttgggaagaagcctttcactactcttgatggaaaaaaacagaatccatattccaactctccgtcaatggcaacttgtttttcagttggtttctctccgcaccgtatcatgacatcatctatgcggagtagtccatgttctctcatcttagctttctccgtattgtgaggggaagtttaccggatatctctagccgttaagatcattgatgttatgatcatggcctcccggttcggatatctggcaatatattttatcaataccaactgccgagctgcccattgattaaagtcacctatctacgcttccagccaatcaatacccatcgctacccatatatctctcacaattccagtcctatacggctcgagaggggattccggatcatcaggacctcgtgatccacatggagtccatattcggattagcgtagccgccgtgcataagcgtcaatactctaacctatctcgtactagtgttggtgggtaaacaggagaggatcatcgatgtttcagctgagacctattgtcggtccaatctcactgctcgtcttatcttcacgtcatatgtaattgcataggtgcccagatagaatccccagttaaacgttatctcggcataaatccatttctccactcggtggataccgtgtttgggaacttgctccggggagatatggaataacagattgagtgaatttcctcctcactcgtaaatatggtcagttttatgaatatctgcacctcccctcaccagaataggagataaacagcccgaactcctaatgcttattgcgtccgaaaattcctctgtaggttttatccaactatacccaagatttgactatttgaaacttacccttgttatatcttttcatcctagaggattattcactctttcattcctcatcccgcttttgttaaacctcgatcatggcagacgatgctactgccaaccagcgtcgttcttcaaagagcaaaggctccgaggcctatgcacctgcggaataccctaacatcgaagaaggcaaacaatcgtcagcaaatggggtactagaagccctgggctatgagcctgaactcattcgaaaccgctccacgcttcaggtggccttcatgtcctttgtgctcgcagcaattccatacggactggctacgactttcacctaccctcttgttgggggaggccctgtcaacataatctggggatggcttgccgtttctttgattacgctatgtgtggctgcttcacttggcgaaatcacctcagtctatccaactgccggaggggtctactaccagacttttatgatatctccaccgtcatatcgaagaatcgcctcgtggatttgcggatggtcatatgttgttggaaatatcaccatcacgcttgcagtcaaccttgggagtactctattcctcatttcatgtatcaacgttttcgaatcctctccaggagtaggaatcttcgaagcggaaacgtaccaagtttttcttatatttatcgcagtcacattcctcgctaacgcaatatcgacatatggaaatgcatggctgccttaccttgacgtatgtctaaaccataacccttccaacatcgcttgctaatacagaagctagacattcgcaatattcgtgacatttataggagtgttggctattgtgatatgtgttcttgtggttgcgaaagagggtagacatgacgccaaatatgtttttactagttttgagccgatatctggctggccagcaggctggtctttctgcgtcggacttttacaggcagcttatagcacttcttccactggcatggtgatttggtatgtaacatgttttgtttcccaccccagatgactatctcccatctcatttctactatgaaacccctatatctgacgcgtcaaaagtatgtgtgaagaagttcagcaaccatcaacacaagtcccaaaagcaatggttggaacggtcattctaaataccctcgccgggttcctcttccttattccattggttttcgtgctccccgacacaaaggttttagcagctctcgaatccggtcaaccagttccgagtattatcaagtccgctgttggaagttcagttggatcattcctgcttctcctaccattgatattgctctcgatgttctgtgtcattggctgtactacgaccgtctcccgaagcacctgggcgtttgctcgcgatggaggtataccaggctccagatggtggaagcaggtaaacagagacggcgtacctttcaatgctatgatgcttggcatggttattcagatattgcttggctttatctacttcgggtcaactactgcatttaatgcattcacaggcgtcggagttattaccttgactgtcagctatgcttgcccaatcgttgtgtctcttgctggaggtcgaagacacataaagaatggccaattcgatcttggcacactcgggctggtttgcaatattgtgacattgggtaagcatgcacgatgtgggcacgatttatcgctatcgctaatgcatattctagcatggagtcttcttgccattccgctattttgcatgccttcttcaatccccgtcgctgccgatacggtcaactatgcaccggtggtgtttgttgcatttatactaattgcttctggatggtactgggtttggggctacgagaagtatgttgggccgccaacaatggacgatgagtttcgctcatcagacttgtaaagtaagagatttggagtaagaagctccaacataaatctgaattcgaaatctatgtgtatcttttaaagatggcccagacccctgaagaccagggcccgggctaggccctgcgccctaaggtgggcacccggccccggccccgtagctttcggctgactaatattggtccaaccaaggtttattcccgctctcttggtttctgccaaaactactctcccaacttcaagtcaacgttgaagtaatactctgaccctctatttcctgacatatttgactatggaacccccaaagaaactcaaacttgcaagtctaggtagctcctttgctgctggtcctgacattcccccacaaatcgaaccacgtgcagcgttgcgatcaggacagaattacccccatcttctggcgcagcacttgaacgctgatctcactgatctaagcgtttctggtgcaacgttgctcaacataacagtcgatccacagtctactccgttcaacatgaccttcccaccgcaaatctccgacctccccgaagacgccaatatcgtcaccgtgaccgctggaggaaacgacataaattacattggcggcatgatcgccgatgcttgcgatgctgagctccaatcttccgcgtcactatcgcccagcgaattggcagaacgactagcgggggtcgttgatgagatacacaaacgggccccaagggctcgaattttccttgttgaatatcttgctgtcttggggcctggcactcaagctggtcgggatatcccgctgacccaggagagaattcagcattaccgcggtgttgcgtctgttctacaacatgcatattctgccgctgtggaaggtcgaaccgattggtgtgagacagtcccaattcaccaactcagtcaggaacatgcacttggtagcaaagaaccctgggttggagggtttgcatcggggccgcttctccatccgaatcttgatgggatgaaggccgtagcggatatactagctgagactatccgcaagagcacattatccaaagcattgtcgtgaatgtactcgttaatcaagcagatgagagcaggtttgagctagcaccatcatcgtgatcacccgattatatcatgctcggatcgtcctttaccacataataatactatttcttcgttaagaccacgtcaaatcttgcttgtttcgtcacacaaatgacaaatagcatcagctttcacatctccataatcatgacccggtaagtgtattggggctcctaaccaggtgaaagctaccaatcagaatcctgcaagggtcttacgtgtgatctggcgtaaccccgcatttggggtgagacgggaacgccgagagcttcttcccagccctctggtaactcaagccttcttatagacaatcaacattggcccttgctactcactttaacccttataaagatccctagagaagaacaaggacgcttgcacggctgatacgcttgtagcatcgaattttcggttgtaatcaggcagtgcaaacatacgatgcgcatatttgtcgactgtcggtcaaggccatgcatacgcggcacttgtcgcccgtatagcagacaaacacataaccaataggacgagatttgccttgaatgacgggcgacctagtcgagtaagcaaccagtagtgctaacaaatccaagcggtcaatgcgagcgttgcccttgctgtcttgagtcatgtataacgtgaatttgatggtttcttttgtcaatatggcctacattatgctgcgcgttttagccagaagaattagccagaagaaaaaaagacataatacacagtatttttatatacaacgtctttattgtcggtcactcaagtcctacttgaattacatccggaagtatctctgtcggtccgaaaacctcgggaagtcatcttccgggtccacggcagaagcgaaacagtctcttcaaatgcatccgcgagttttgttacaaattagagtgtattgactgccacttatcaattggtattttggtagaccacccctccaacaaggccgtgatatccggaacctcgacaccgttcctctccccgccgagctggaggagcgtgtacaccttgcgtgtagacctgacaaacactggacaggtatacaatagactgggatttccttcttatttaacagagctattccgcgggccacttcacatggccggatattctcgcaacataatcattccagacgaagaagccttttgcagcagcagcacctcggcaaggtacaacataattgaacgcgcttggcgccttggcataaaaagatcatcatcgctagctctattactgtctacagcgtgagttatgcagtgtgagacgaaaattattctctttcccagtcgaagaaaccgccgacgcaaaaaccaatagacacatacgccatctcgaaggtgtgcggtgagaacattgcgagtggcttcgcgcgccgatgtggaatcgagtcgcgacatctatatcctgcgcattggcctcattgtggccccggaagagtaaagacaggctatgttccgatcatacgttgaaaatcctgagcgctgcatggctgagcatatatcgatgatcccgatctcgggttgccgttggggttcagatctttaacgctgtcaatgatgccattacgaattacgagaacttcctggcgcgggtagagagactgcccatcggtaatcagaaaaccaagttgcttgtgctagcgaagagcatcattggacgaagtattatgaatgaagagaaatcaattctgattcgtcatgttcgtaacaggggcccttgtctttcatacaaatgatcggggctagggctatgttagtaagcagatcacgcgccagttcccgatgacatcagcctcgcttccaggacaacgcttggccaaatcagggaggtgatattctctccacgttgcagcggtatgttctggcctgtctttttcaagttcaaatacgaggtccgcgctgtcatatgcgacctggaacaaaggatgcaaggacgcaaggccctctaattcaccggatggaaaaaggcacctatgccgctagtaaacaagtttttctccgtggcgcaatgaagcgggctatgatcctggctatgaggctagaaatgttcggcaagcgggctgcttaccatttagccgtggctttttaccgagatactttcaatatcttgcccctgaacctcatctgggaggtttaaggtgagacgttgagacgttgaaataagttcgtcagatggtggaacctggaggccacgacttgacaggtcacacaatatggctactcatgagatctggagagatttggcgagagaaaaagagagctccaatcatgaagtcgcgggctgggaagcgaatccttttgtttttttgatctctcactactattaccacatacagcatacattacacccacatactttctattatgaattcatatcatacgttacttctatccttacggggagtctgcacaagtccggggtaccccgatcgtccccgcatgcaatatacggccccagcttcatttcctttgcttctttgtccttttttagtattttttctttatttctttcatttctttttcagggctgggtctcccccaagttccccccccttagattctcctatattccacctcacccgcatccacttacacctacgacacacgtcatgctattctcctaatactgactcaacgccatgggcgatttcaccgccgccggggatggcatcagcggtcactaccagggcacctccctaggcatgcagatcgccatcgcaactcttgctggtatcacttggtacaatgccttcgagctaatgatcctcctctttgtcaccttcgcagaatatcgaggactctacttttggagtttatttatttcctcctccgctggtctacttccttactcgctgggcttcatgctcaaatttttcaaaatcaccgagcatcttccatggctccctgtcactttgctcacaattggatggtggtccatggtcaccggccagtctgttgtcctgtactcgcgcctacacttagtcctatcaaaccagcgagtcctgcgtcgcgtgttgaccatgatcgtgatcaacgcaatcatcctccatcttcccactacggtcctcacctacggtaccaacatggctagcgacgccaccctgggctcgtggacgaaaggctacaatataatggaaaagatccaaatgacaggcttttgcctgcaggaattcatcatttcagggctatatatctgggaaacggtacgcatgctacgcctagacccggaccgtaccaagcgcaagattcagtaccaactactggtcatcaacttcatcatcatcattttggacttgggcctgctcgtcgccgagtacttggacttctacatcatggaaaccatgctcaaaggagccatatacagcatcaagctaaagcttgaatttgccgtccttggtaaactcattcacttggtacacaatcacgtctggaaacccgaatcgttctctgcgccaagcgaactccccgattttgtcgacgcaagccgtgtaacctccgatgtgacccgtgccgtccctggtgtcgttcaacgcaggccttcccggatggaagctgatgacatttctatcgccttgttcgaacatttaccggccgaacgcatacgaaccaattccggctcgtggagcaatgaagcccgcgcttatcatgtggatcacctcccgatcgactttaccaattctctctgccattatccgcgtcaccaaagtcgtcgcggacttctcgagaaaccgggatgagaataaatcctgtcacggcaatatcctccgccttctttttttatgaatcgcggttcatgagatacgatcttcattctccgtgaacatcacacatggatcagtcttcaaactggtctcaccctcgacatctccgaggaaactcaaacttccctgatccaaatatcaggcctcgcgcccagctccaggattcacccagcgttgctgtgccacagagccagtaacttccttaatggagaatccataaatacgcaactcagagagtgtagatgtgtattcatctttatttgtatataaacgattccctgtagttatgtcgattgcacactcattctctctttcgaatatacagaccaccttcggttctgtgtgaatttatatcgctcttcggtcgtggcttccgtattactctgagtattcgtgcaaacaatattttgaattggggcgcgctataggccaatatggcaggctttccgagtatgtatatgttaacagtttcatatagctgcatacagattcctaatgatatcttcaatttggagcctactaaatattatggtctaaaactctccgggttggatttccatggatagaaagaactttagccccgataagcttactttggatagttccagggttcggatggttatagcttgagttttaaattgccgatgttccaaggttggatattcttaagtgaacgcttcttgactccagagatcctatgcccttccctaatatcatcataaatcaaatggattagactatcaaagtcagagaccgcctaagcaagcacatgcacttggagaatctagtcaaaggtatgttatatgtctcaaccgcaatataaatcaacaaatgcccgtcgatacaatgatacacgcacaacacaattcaaaagatggatggaaacgaaacagctcataaatcgtacatagaaaaaggagctagaggccaggtttctcctaccaccagactcaagacctcaaagtcccgaggctcgaacgcttaatctcgaatgctcgagatccctcaatcaacccatcagagaacttggtcacagccacccacgccggactgaactgtcttacctcgtcgagagcggggatgaggccgattcggttattgtcgctccatagacatgtaatgcggcccgtgatggagaaattgccatcggcctcggacgagtcatgctttgagaaatcgacatcaacagtccacttgttgtcccatgtacgactccacagttggatccggctcagaccatctggggacggatttatgaagcgttggtctggagcggaggagccaaccacactaaagtctgtgatataattgccgtccatgttgatacggcagttacgcgtattttggcctgatacttcaaagcgaacagatgaactgtccgattgagggtgggaaatgttgaaggaaatccagtccggcgacagctcggaagcctcgagtagagagtcggcaccctcgtttggaagcgatagagattcagggctggggacaacatgtggtattggtgcattccaggagcatcgctgaactcggttgctgcctcggaaaatccaatcacaggcctcattttggcctgctgcgctggggagcccgtaggtaacttccttgacaaatggaggcatgccagtcagcgaagcagtagagaccccattgtcgaggtcgacctcctgcaggaagaacagcttcaggcgattggagtctgcgaacgggaaggcgacaaggttgtagatcaaggttccgatgaaaacaaagagtaagaagataggcaggtggtatgtgtaacggtggataaatggcagaataggtgcaaataggagtacggtaagactggaaataaagagataaacaatcagctgggggttaccatcctgaccagtttggctgagggcgctggtaatcagaagagccagcggcacgatcagcatgagaatcacgggagctgtgataagcagctgtaacagccacgtccatcgcggcaacacgccactccacccctgctcgtcctcatacacgtttggatctttctcttcatcctcttcgtcctgttcatgagatccgcggtctaccccaacgcggacgtagttggcaaaggtggggcggtgccggccatgcaagagcgatgttgattcagtcaagtcctcttcagtatcatcgtcctggtcctcatcgcctgacgtagcaagccggcttccctgagtactaggccgtcgtgattcaaataatctagcagcgtattctgacttggttggcagagagaacaactccaaataggagatccatgtagccaagaaggtaccggcaaagtaaaagaacatgaaatagccaccagcgagcccttcctcgtgttcataaacggtgccaactaccatgagagaccaggtaagaacaaacatccaagtccaggtatagactcgatgaaaagctgatgggcgtgcaaagtctgcgatgcgagatacaaaccaagctaagaatatccaagctgagatcatcatactccatacggcgtatgagctgctatgggcaataaaagggttgacttttgtaaccatataagccaagccgacagtcaccgctgtaggaattaagagcaaaaacgggaaccggaagaaaccacgcagaccacgcaacgggatattgtcgtcgttgatctcggaatacaccgatgagcggaagagatacatcttatcagccctcgaaagaatgatactggtgataagtaatgtcaacggcgccacaatcagcagtgtgacagacaacgcaaagagtgtgtgcagacggaagatggcaaaagcactcccaaacagatcgaaccaaacagcccgggtacctgagccgctaggcacatttccatcgtcgcggagatgtccgtcgaatcgatcagtagcgtcagacaaaagctcctccgtcgtagcaacagcagtagagagcatgtgccaaagcgagtcgatattagtgtgtcgagcatcatcctgatcggtatgataacgagctcttggttcaaagaaagcgacatccaaaccgcgcaggcccaagataccttccaggacgatgtaatccgtctggctgccaatcaaacccttttcgaacccgttggcactcaacactgagccgaatgggtgctgtgatttcgcatacgcctgggtgacctccgtatccgagctgcggaataatgtagcacgccctccagcacccgcaccttccaggttcaggaatgtgtgtgcaaatagcgccatcggatgctgactgtacgcgcgtgcgccgttcagatagtcctcctcgccattgttgaaaagaaccaccaacccgcggcgcggcgcatgacccggtgtcaggaagtatttcaccagctgcaggcacgttacgacaccaactccatcgtctgtcgctccgtacccggtcgaaacgctatcgtagtgcgcgttgacaagtactcctcccttgccaacgggcactcgtccgggagtctcccaccaattctgcttactatcttccgagccgcgaatgtagaccaagatattggtgccttcaaagtaaacaccgacgcttttatcgatgaaagtcaggttagataccagatcgtcgaaaacaaaaacatcgggcttctcttccttcgcgtcgcggtattcctcggtggatgcggcggactgcttgatcgcgtcaatgcgttcgagcaaccacgagcggaccacgtcattctggtgcgaattgtaggggtgaaagcctgttgtcaggctttggagatcttgccatgcctctgtgaggttgaggccgttggggcttgtttggggcgcgggcgggacaatgtggtggatcaccagcaatgggataatcaaggcgaggtatacgaccgtggtgatgattgttactggccacggcgtaaatgccagaggatttctggccttctgggtagccataccctgtgctgttcaagctaagaatgaatgggtggtggaggttgaagttggagtcgaatttaaggcaaatgcgggggtggtaccgtcattactttacataactagctcatacatccgtttatgtacatgtgcagatcggctgcacaagtcgtgctactaacaacaactgcagtcattgatctgggaaatgagtgaaagaaagagatttggctaaattctatgcgattacacattgacgaaaaaataacccaagtccgtaaccgctagcgtactaatgcatttcccgcaataacacagaatgaaggataaggtgatctttactcatatgggtagagatatgtctgcctgtttgatctagctaaagatcatggatgaaagaagacagggaattgaataaaaggaagaaatgaaatgcgagagcctagggcctgggcttattttcgactgcaaagaaaggggtatcgtatcaagtattcaaagtcccaacgtcgatataatcatcatctccgtcgttgataacggttgcgttcatcagcccagtcatttggccttcatcttcatccagttcttcgtcgtcatcgtacatcgtggcttcggcttcttcttggaattgtggttcactttggttcaggtaatcccggagtcgattgacaccatcaccgctgaacacacagaagacgtcccgttgttgttgcgtgaactctgggggggcttctcggcagaatgcagtgaggttttctcgcaagaactcttggacgccggtcaaactcaaatgggtcaggcgtgggcagctattcagcaaagcgtgaataccctaagccgtaatgtcagtattgcatatcgtgtacatcaggaccttcgatcaagacttaccttcattctcaactgaacgcaataacttagatgaacacgctctaaactactgacagaaggatgatggcccatcttgggccgtgccaacgctaaaatactctgatcagtgatagcctgacatttgacgagcccgattcttcggagcttcggcaaggttgccaattgctgcacactaaggtctgtgaggaggttacagcaggccaggtcgatgtatcgaatgcggttgcaagacttgaccaggtttatcacggccgagtcggagatgtttgaacagtggcccaggtgcacatagtgaaggttctttcctagcctgcagatagccatcacagatcgatctgtgataaatcggcatttggccagtacgagattccgcaaacgaggagctgcacgcacgatccgctcaaccgagtcatccctgacattctcgcaagcggtgagatcgaggatgcgaagactgtcaaaggtcatttgcggaggtagcgacatgaacgcactgtcgtcgatttcggtgcattgtgcaagccgcagttctcggagataccggagtgttgtgagcaacggggtcactgataagctagtgacaagtttgcaatcatgcaagtcaatttccagtatagacgggcagttctcggcaaaggactgaattgcccgatctgatacattagaaaccccgttgagtttcaactattacaattagcgtttgcagtccaacaagatcccacatataatcatacccttttgatttgacgacacttttgcgatacaacaagcaaagcgtcgtcggtgacttttgaacatcccgtgatgttcaggccttgcagacggggacagtctctggaaaccgtggcgagcgtgtggtctgtaaggtgtcgcaattctgaaacatccagcgcctgcaaatgtcggttcccttccaccaaatccgacacacccttatccgtcaagttcttgcagcttgtcaacgtcagccgctcaatgcgcttgcactgattgaaagagacgatagttccatcgctaacatcatcggacagagcagacagattcagtctcttgataaggtctgcgtagttgaaaagactgtccggttttcccaacgacgtagttacgcttctcacattgctccaggtgttacaagtcggtcggtgccacagtatccctacagagtttgcagcccatccgcgacacaccagcatggaattgagcatatctaagggcgcaaccaatttcgagaaaatcgcgatcagaatctcgggtgggaggcgaccgatcggcggcagtggctgggatgtttcacttgacaaacgagagtcgcggaaattggcgacaccgatggaggattgcgagtcgttggcctgggccatgaagaaatcggtgtcatcatcggcgacacgttcgggtgacgtcgatccagacgtttcggaaggggctgcactcgagcaccgaccgtcttctcgtagtcgatgcatcttagtcggcgtagattcgctttttgaggttcgcttcaatatgttttttgggtgtcggtaaggttgaaatctcataactcagggaactttgcatggacagtgcatgtgagactggaactggcaagtccggtccacagatgcagccagtctttgttcagtcaacggtcctaagactttgttttgtctgaagactggtagatgaatgtaattttcgggaaatatctgcagtaaggtgggtgcacgagggatgtaagcgtggtttcgcggcgcgtatttggatggcaaggggaggtggacaagtgcagatcgttcagaataaagttgaggcaagctagatcatggccccatgcaccccttgggtaagatgcaaatgcgtaaccaggaaaatcaatgcaagtaaatgtgaagggataaaagcggcgatggaggggggatgaggcaatggggccgggtttcacagtgctgtggagtcagtgccaagcactgcttatcgctcgataagatgggagatggggtctgaagttagtatagccagcccttttggttatggaacttgcatgtagactctttataaggattcgaatggcttattgaaccagttaatattagaagtattcaaggtcgcttgatgtgaccccgtgcttgatctacgatcggtttactcaatgcgggaataccggacatctgacctcattaggatgtagaggaagccctactttctttcagaacttttccgacatgtattcaaagtgatctaataatctacttataaatatatccatctcagtagtaatcttcgtctaagcttctctcgcacccttcacccagtcacgcaagacgttcttccggattttgccagtactggtcttaggtagttcagggaccacttccacttctcgaggaatcatgaacttgctgattccgctactatttcgagcccattcaatcaactctgagcctttcatgtgcttgccttcctttactgtaacaaaggctttaggtcgttcgccccagtgggagtcaggaacagaaacaaccccagcctccaaaatgtcaggatgcatgactagcatagactcaagtgcaacggaggagatgttttcgccgcctacgcattgttagcaatctagtttcatggcagttgtccgctcgccacacataccactaatgatgatatccttcgcacgatcgagaatctgaattgcaccatcgggatgccagacagccaagtctccggagtgcaaaacacctcctgcgaataatttccgagttgcctcggagtccttgtagtaccctcgggcacagatatttccaacaaaaacaatctcgccaatttccttgccatccttgcgaacatcaatgatggtcccttcgggcacttcggtcttaatgacccggcctggaaggcttgtaatgaagccgtggccttggcgggccatcttctggtatttctccttaagagcaagctcgttccattctggcaaatggtagcccttggtgattgggccgtatgtctccgtcattccataaacatgtaccggatgtaagttaaggtcggtcatttgttcgaagagaagaggtgtaggtgggcttgctgccaccgtgacgtggacaggctcgggcagtttctctgcttctttcgcgttgcaaagcaaagtgttcacagtcggtgcagcattgaaatgggtgatacgctcctctttcagcaacctccagatttcagggtagtctatcttgcgtaggcaataatgggttcctcgaacggccgtcaccgcccatgggaacgtccagcctatatgtataaataaaatgttagttatttagatccatttcgttactcaaatgaagatgatccacgaacccatagcatgaaacatgggtagcgtccatagataacgggcacgtccatcgtggtagttcagaccagtttcaatgatgtttgccattgtacccagataacagcctcgatgagtgaactcaacacccttgggacgggctgtagtcccactagtatacgccaacgcaattgtcgaatcttcatcggcagcttgactctcgagtccttcccagccatgagaacctgtatcgatatcgtgcctgaggccttccaaaacagcttcatcgaagggacctgtcagctcaccctctgttacatcggcgtcggtatcgatgataatatggatgtgagggtattgggatcgataatgctccagaagtggaacaaattcctcgtccacgatgaccacttccgcatcaccatgatcaaatatataagcaatgtcttcttgtttcagacgatagttgacagctataaatgtgttagtttgattgatctctctccccaaaagctaacaactagcttaccgatgttaacagcgccggctgcggcaattccgaaaatcgactcaaggaatgcgggagtattcgggcacagtatccccactctcttgaatccatgtttcttgaggtagtatgccataccccttgctcggtctgcagcctcgccatagctcctgcgaaggatcttattgttggcggttacatggtagatcgcctcagcctgtgcaactctttgttagattgaagtactacctatgtaccatctgaaaagtgcttacattaggttcaatggcagcagcccgaggaagaaagaaagtcggagatagcgtatgggtattcacacggtgttcaatcgggggcgttgaacctgtgaaatggccaagcaggccagacaggcgagactttgagccagacatactacaccgtgagtgtagatttatggaaaaggggttgttaaacagaagagctatgtgtgatatcgacgaatgaagaggtaatgattggaattatacggggaacatcgtagagtcgggaaatgaaataccccaggaattccccaagttggggaaaatgcggggataccgctctaacctaggctatgcgcggggttattcgggtatcagcggcttggaaatggtttgatctacgttgtaccctcggcttcaatgaattacatattatggattggtctgtcggttgtggttgtgtggggacaagaccggcggtacggatccggagggaatcatccttaattttgggtggattacgttaattcatcttactcaggtatcactggtcagttagataatggatatatttaggacatgcggggatacacgtagggaagaggtgtgcatgctatactatgaatggtataaaaagtggtacgttacaggctatgaagtatatatataaaaaaaggataggtcaaagtattttttgatcataagaatcatgttgaactcttgaaaattgtttctttggattaaaccgccacggcgcgagtcaacggccagctattttgaacctttaatcccaatcgactccgtttttttcgacttttgaaaacttcgaagaccccagtccccgagccgtcatgtccgtcacagacagtggtattcatgagttagggaactgggctgcagaacaaggtcggccggcttgccgttcgaattcgctgaaagaaaaccgtccgcgattccatcccagaaccatcgctcgacacaacaaccagccgcgctaaaggtatctagtagccatactgagcaagctgggtcttggtcttgctgtccacattcgcaccctgctcggccttggcaaggacacgacgagcggccttcttgcgctcgtagtaagccttgctcttgacctttcggcgctcctcgagtctgtagaaatgttagaatttgtcgcttgacataaatcaccttcaattgataaatctgagattgtacatacctggaaacaacatcctggtacttccagccaacctcgtggctgagacggccaacggtgcagtacttgcggccgggacggagacgcaggacacggagggcctggggaacaacgacacgcttcttcttgtcgtaaggagggggaacaccctcgaagaccttaaggcgctccagagcggcggcaccacgggcggtcttgtggggcatcataccgcggatggccttgtagaggatacgggaaggagcgcggaagtggaagggaccaccacgggtggggttgaaacgagtcatcttgcgaaggtaggcgtggtacttgactgtagggcggaatttcgagtcagctctctgatatccaacttgcagtacatttcctctgaaagtaggcccaaaactgccatccaaaaactgccagtagtttcgatatgcgggtgttttccgtcgtgtcttccctccacactgattcacacagtccccaaatcacatagaacgcaaaggaaatattcgagaaggggttgaacgtacgcttcgcgcggaagaactcgccggagatgttgagggcctcacatctcacgacgacgatcttctgaccgttgagcagctgcttggcgacagtgctggccagacgaccgaggaggtgtcctttgccgtcgatgacgacctatttccaaacaattcaagtcagcgatagattcgatatgcacactttgcaggcgagagtggcggcactcaagtcgttgggtataaacgtaccactgattcaaaggaggacatcctggtgatcttatgtcccgtgggatggatgttgtcggcggttgttgtcgtgggtgtcaagtcgacgcacacaacgaagtcggatggctcgatgagaatgggctaagcgagggtccgctcactttgtgttaatggcgagggtcgcagccctaagcctgaccaatcatagaccgtaaaggtcacgtggtttgtctctcctgggtccgctcggcatcgtattacgtaatacttttatttctcactgtgcgccatcatggtgctcttttctttgtgccgttagggcattggcttagggctgatataccctgttcttgaaggttgctgtagatcaaatgataatcttcaagttgtaaggggggttggaggctttggtataattccaatattcggtgagattgttcacgttatactaatagacaacccgtggactatcaatcatctttgccttccacgtaaacctgtctgtgaagtagtatgtcttatcgtcttctcaattgtccgatctaatgatctagccaacttcaggtgggaacgttgggtccgatgactaagatatccatgaactcgtccacggacagatctcggccattgtttttcttttccccgaaagatctttcttctcacagaaataaccaaggccaacgagacttccactgggcctcatgttacactaatcttattcgcttacgattccatcccacactccaacttgattttacgatctgaggcaagggttctttctatactcgggtcatgcgacaaaagacgcgttttgtctgtgtctctgacacacacggatatacgccgtccgaagcgggcttcaagctaccagcaggggatgtcctgattcatgccggcgacttgacaaacaatggaagcctgaaagaactccgcaagacaatagattggatcagcaaggccgactttgaaatcaaaatcatagttggtggtcagtcatttaacttgttgtactggatataacccggcccttaatggcagtcatatcctcgctgctcgccaaattgcgtcattcattagcagggaaaggtcgattcagagcccctaacattttgaccaggcaaccacgatgtcaccttggacccggaattctacagagaacatggaaaaagattccatggccagcacctcgaagattcacaacactgcctcaaactcatcacggagtcgccttcggtcactctacttcgccatgagcccgctctgattcgtttaacgcgagcaggcggaccaaacacggtcttcaaaatctttgggtccccatactcccaatcccaaggaaattgggcattcggatacgaatcaaggaatgctgctgcgctgtggggtcagatgccaatcgatgcggatatcgtcgtcacgcatacgccaccacgatctcactgcgaccaaaagccgaatggaatgttcgtagggtgtgttgcgcttcgtagtgcattaagcctcatcaggccgcacttagctgtttgtggccatgtacatgaaggacgaggatacgaacgagttcgctggcgaggcaagcttactaacacagggacagagagagagacagagacagaaacacagctagaatctgattcagttgaccaagtcactcggggaattctgccacccatgggcagcaacaaacaaagcctagttgatttgactggcaaacgggatcaacgaatagacaacgaggggttttcgtatcccgggcaaagacagcatgatctagcagagactcaacccgtgtcatcagcatcaccagggtcagagtcatctgctagtattcttgaaatggcaggtccacggaactcgccgagcgctcatccgtccctgggtacgggtagccatggccccagtaaacgtggtttcgattacggcttgtaaacactaagaaaggagacctgcattgtcaacgccgctgtcgtgtccactagctggccgcaccagggaggcaaacggttcaattcgccgattgtagtcgatcttgaacttcccgtgtggcagggagaccacgcggtcgcgaataggtgaattgtttttccatagaatgaagcaaatttcggaaattacaattcagtcggccccatcgatcgtaacggcaatcttccctttgctttggccgtgcatggtggcttgacgccattctccctgatacatacagcaaccttgtgggctttggccctattgacaccggtagtcggacgccttgatgcatcatggttttaacattggtcggctagtgacttgatgcacgatgctaactgactagtgctgtcagattgtctccgcttacatcatttattaatttacgcgcattagcctcggtcaaagcaactcgaggataatctatactacgtactctataccgtagggatacctgtaacatattctaatattcgctaatttgatagaaataagaaaagaagaaatcaccgcaattcgctctcctctctaactacacaaacaccagacttgcctatgttgtaggtacccctcttgtctcgtgtataccccgcatgcaatggacaaacacatctgaccgatcgcaataacatcgagccatatgcacctgtgatatcacaactcgagttcttgattaacaccgtaagttcccaggtagtacgatatacacaagtcacctgcaacagagatctcctcaaactcaaaacttccagaaaccacagcgcttcgaaacgacttcttagtggccaactcccgggccgcaaagagcacagaaacatgagccgaccaatcaatagctcgacccgccctctccttgatacccgatgtgaccatgcgcggccgatcatgtattatcaatcaccggaggttgcctaagtgggagtctgtgtttgtgaccggttcttcagcagggatttgggactgggacagcgctcacactccaccctcgtgggaaacacatgcttctcgcaagggctgctgtttaggctggcgcattcttttccagaaggcgttgaatggctggacggagaggcctggccatatttttattctgtaccccctacgcaccatgtaatagccgagagtattattgcatgagaaggtagtactagacatcattattgcaggcgacttgcattgcatctgcattttcctgtttcccgggtacaagcctccaaccgtttcgagccaatggtgtataaagtgcattttagtacgtagtttgcatatctcgtacgttgtatgttgtatggctccgactgttcggtgcgattatcctgacgaaactacaaacacaccattaatccactgccaacgcccaatcgtggactcaccgacttcggtcctagtggggttgcgtgactgtcagggaggggtatctgtagatcacggtttaagcgtataaggttactaccctgtgtttcagagggaggcattgtgtgacctcgcgagcacaactgatgggatcggaggattatgggttcggctggtgcagtccggttggaaagagtgagagtccgtggtctagtcctggggatcgaccaaccccagaccgaggcaaggtatgctacaatcactatcacacaggaaactgtcaaatgacagagtcaggcagataagaataggagatacggagtatacaggtacaatattgaggcggaaatttgaggcggaaatttgaatggtgggtccttaggacaccttaatactaaatagaaaggtacaacatacatggcattcttagcaaaatgaagactatttaggcaatatagtcatagtaatatggcgtaactaccgagtacggaatatagagtagtaagataatgacatggtggtaatgctgacacggtgttcggtatttgcatttccaactttgtcacgatccgggctggcacatcagctccgttcaggctgtcagcaccggtctggaaaatgaatgcgctgcaaaaaccgcagtcccgggtctagatgatttggaaccaatggatgggccggaccgtccgagacaggggagtacgacgtagtttcatcgagtgtactgtaattgtctcatagtctagaaagtcagagtaatggttggaagatagggcccgaggtctcgggtgggggttcaacgacacgttgtctagttagtcaatgggcccgttgcgggacaagtgccagctgtgccagctgtaccagctgttttagcttaggggagattattgagattattgggtgcgaatgcctgaagagtccgttactgatgtaagatctagagatccccggtaataccgagggctgcattctgatataaggtgagaatcaaatatataccacatacagcatacatagttatatgaaacaatatctcactatatatagaaacaggcacattcttcagcgatggaacgcttcgggaaggtgggcattacaagtcaggcactgatttcgttacttatatctatggagtacagatacaacagtcaccacccaatcacacgtttcaggttaaacaagagagttagatatgactggctgaggtcgacaggctcaagacaaggcggaaaaagtttaaacagaaccaactcaagccggataaagcgaaagcagtgaggcgaccgaagctaaactggctaaaaacccgcaggcactagttggacgaaagtcggggatatgcaggagagactgaatcgagaagaagaagggattagcggcatgacgagttccaagagaaggcagacccgattcctatggaatcgagggatcatgtccctcgtgttatgtacttcatcgccccacgcagcaagccaaggtgctggtgaggcgttgattggtaggaatgcgagcaaatcggacgaagtgctcagaccaagtgaatgtcagtggggaagagaatgatttttttgtgattagatgattattctgacgagtagagggaattaggatattaggttgggcatccttgtctctgaacctcttttcgatgtctatgtgattctttataccgcgatattacatctcgaaataccgaccttctctttgtggcgcagtcactttcgcccctggcatatatcggttggctgggagcgagaacggacggcaacactgcggattttcattgtccaatttgtatggcaaatcgcccatccttttcacaattctcttcaattcctcctgcattgcaaatcatatccagtccattctggatcggtgtggaatttttgctacgtcaacgtcaggttgttgacattccatatcgcccaccgcctcttttctccccctctcccctcacctttttatctcctctcatcccattcaatctaaggcattgaaagcataccttgcccacaatgtcctcacccccagatatagacccatatgccgtgcttggtgtcgccaaggaagccaccatccctgaaatcagggccgctcaccgaaagcgggttctcaagtgccatccggacaagatccaagatgagtcgcagcgcattgctgcccaagatgaattccagaaagtccagcaagcctacgaactactctcggacgatgtccgacgcactaaacatgaccagaaggtcaagatagccgagctgaagcgggaactgttggaacgcagacgagcagacctgatgcacaactcctcgcggggaggtggatccgccaatcgcgaattccgcaatggtcacgtcgtggaggagagggccccaatggaatgcttcttcgaggaggcaatgcgattcacggacgatccacgacccatgtctcgcaaatttgaagagttcggcgtgcgcccaaagacgaagccgacagaagagaagaagaggactcgaacaccgatcaacatgtttcaccaagcgaaagaaatgcgggagacggtcaaagcgacacattccgaccgtgcgaagatgcgcgatcaggagcgacgacgacagaccgaggcaaagaagcatggcatctttgaagcctttggaggatcggacgaggagacgtctgattctagcgctccccattacgttcacacgagacgtacttcaacaacgcgccgtgaacgcgaatcgcgacctcgaccatcggactcctctcgtcgtcgtggacgccactacgacgaggatggcaatgtctccgatcacttgcaatccaagatcgatagtcagtactatactgcggaggactacatcgcaagcaaagcccggggttcaaagtccccacgacagtaccatggtcacgacccggcggaaccagagtctgcttcgcgacccgcgggacggtccacccgcacccgccgtcattcttcgtcgcgcgagaattcctacgagcatctggattcgccacgaaactacgatggcaagccacccaagatgcaacactccgcgacttccccggggatcaagacgtctctccgtcctgcgttcctcaacactcggtccgcaaccacctctggcttcacccgcgcaaagcgggacagtcgcgactccacactatacgaaatggcccacgagccactgccatcgcggggttccaaagtgcgcgatcgcaacgactcgggctattccagtcccactactcccgaaatgctcccgagaggcgtttcccccaagacctccacccgctacaagatcgttaaggaaccagaccacgtcgtcgtagaaccgaaatcatcaaagtaccgctcagcagcgagatcccccgaccgggatcgtgtaccccctacccgacaggtgcccaagcgaagcagtacctaccagaactacacttcggaaacctcgcctcggcttgagactcggtcttcgcggcctgcttctcgtccccatgcggacgtcgaatacatttctcgcccgaaagagaaggacatcaagtactcccggacatacagtcaagatgatgtcagttactcgccgagacgcgccccttactacgacgaggaatatcgtcctcctgccgtggggagacatcagtctgcctattaattcaaccatacgacccatgaaacatggacacatacgacaaatcacagctacaatatgctttacattttatttttaaacttttatctattatttcaatcttatcagcaagtcgcggcgtttccaattctccgcttttcgcatgtgtcggctgttccaccgaacatttgggagtacttagatttccattcgggctggtctggctgtccccgcgcagtcggagcaagagggcaggaccggggtatatctttgtcactgcccttggcgcattagggcgggcataggtggatggtgtgttgcatctgtcttgcctcaaaccctgcacttatggcgttatgaaattgtcttattgggttttacctacttctgactgcattctgcctgcattctgcttgctcccgttctcgtgttctttttccgcgatcttctcttctctatttttttatatatatacgttgtcgctcccgggcttcagatcccccgtggactaccaattggagaaatccaattcacgaattacgcttgttcacatgatatgatatgccataaccttgatcctttgttggtctctttgttttctctattcttgtcccgagtaagacggatatgttgggctgggctgggctgggctgggactggggccacagaaagtggcggggtaagcctcacaccggtttgtgcatggtgattggatcttctaagaatagactgttgatgtatttaggcatacctgttcgatcagtgcaaccttggaaatgttgataagactgcaactgccgacctgtgttatactattgggggctgttcagccttgttgggccgtcaaggctcaatacgaatttgattgtcacttccgcccccttaggaaccaactcaatacaacaagattttattctacccatccctggtcgtctaaagtcaagaagctgatacgtttttataggacatatattacatatattattatccagcacgacttggttgacctagatggccagatgcgacctggaatccaagagatgctgtctaaatctatcgatgaagatggccaatatcaatggtgagatgtaatgaagacaaagtctttctttctagatatctcgtcagtcaggcacatgactcacacgatttctactctcgtttgtttgaactatatgcttgttttatctctcaattctctggaaaccgatagactggatttgaggcatattgatgtatttacttctgttagactctttttccatggcataaataagattgttataacacactttttggaatagaagactagcttgctccttaaggccaccaggccaccgcaagtaattgagcttgttgtgtttcagacttgttctacgtttcatatattcacttatttagatttggtaatgatgatagaagcctcctaggagacaatcggatattacatcgagcctagctctatacgttaatctagggtgtaaggtgatgagtatctgacttggcgagtcttttgagtgtgatgtgcacgaattggccgactacttcctgccagcttgaccatggtcctccatggattaataacaggccatgctatcaagacttagtgatgtatccccatagtcttgtgagttcgcgactcatctcactacttttatgattcgtttcaatgagaaccatgatggactccgacgctcaagaggtttagggaggcagattggctatggcccggttactccagttttggtactactgagcggtttcctctcatacatgctccattatcaaatgctgtcgagtagtccatatgcgagcacatacgtattggtgcgacgagtttctatagcatactggttgcgcacggaccaactgcaccactgtgggttcacgggtatctgcagatcccccgcgatttgggaaaggaggcctggggttctatcgcctacaactagttgtacttgatgcactcagtaccatctaacttctctatttcagactctctttgctccgtcgtacaatgcgccagaatttccattctctccaaatggttattcacggtccctcggttgatctgagtgttggaatttcctcaggagtggcgccgactcgcataacattcgtagggatgcccatccttggaagtactacttcgtacaggaggccacataaactgccgacttgtcttcttgaggcggtactaacaaatggtatacttcattacatggtaatatcaatataaaatcacaatgcggaaatgaagataatcgaacctatatacaagaatgggagacacctagtagtggtatccatattaagagcaagtcgccagggttctaagccttccttggccgaatttacttgccgtgtctaggcgcatgcgcaccaaatgtccgtcttaaacaaggacgtagaatgcacacatctaaaaatcacacagggttagaactaaatatactggggtgttgcatattcagagtgaagaagtagggcttaccatagacagacccaatatcattgagaaccagaataccgcattctaggaaggaagtcagtgaaaatcgcagaatattaaagcaatcatataacagcttacattgaggattgtccggccacggaaaaagcgagacttttgaatcgcaacaataggcagctgaagcatcatagccaggaaaccgtatccccgaagcttcttggtaatgcagctcataactagctcgtggaatacagagctgaccaaaaatgtgataaacatagccacgggttgagagaagttagatcgggcaggccagtagacatggcggaagaggaagtgatggacagggacgttccactcgcgggaaaattccatcctatgtagaagccggttagtcatatcactcagactcttaggagcgtaatttcaacttaccagtcacaggaattccaccagtctgcatagaagtggcgatcggcgaaccgagtcagctctgcaaatgcacccagcacatattcgaagatgacgaggaatactagcaagaagataatcatgaaggggaagaggagcatgctgatggtttcagcaaggatgagagccttgtctgtgacgctagagacggcacggagttgggcgctggccactgacaacacggggacgatgaattcctcgcttgtcagggtgagcaggaagatgcagccaaatacagcagcggccttccagccaatttctgaccagcgtcgctcctttcggcggggatactctagctcatagcaaagagtcggacaaaagaggaagtccacataatttccaacgtgcagattctgcgggtatgagatgttgcctagcggggaggtcaactccgtggccaggtcttcacgcagtctctccaatggctctgcggactggtcttcgttgggcttcttcattgacggccgacgtcggtgtacctctggataatggatggcagcagggggctcaggtgactttaggcctggcttatcgagcgaggcaaggcggcgctctgtctcgctgagatgtccattatagaaagcgtatgagtgcagtttcatcagaatggtcagagtgtgcagcgtgaagaacacctgtgcagtccaggtccatttcatcatgaagggccagctgtttttctcatgtcagcgctctgagctccagcgcaaaaaccagctactaactcactttatccataaaaccaaccaaagtgcttcgcacaagctctgtaagagcatacctccgcgcgaccatcgcagccactgaggaccacttcgccacagttggtgcataggcaggacgagccctgagcttatcaccatggccgcatcgctgagccccatcccccacacattggccgtcaagagactccaaacgcgcacctgcagggggaatccggtatccttgatattgcgcaagatgctggtcccgaccatgatagccaagccaatccaaaagagagtgaagaaccctcggaagttgtgatagtcgctatcgggatcaaaatgtgacacacgaggcacatagtctattgtataaaacaggcgattgcgggcgcggacttgcttcctcgcggatgagatcgaatgcgctgacgggggagcatcttcggaaataggggttgagtggccactaatgtgacaaacagattagctatttagatccagtctggtgcaagttgagagcaaattaccttatatcctgaatcagcttgtccactggaagagggtgcgccacgtcggacttcccattcggctgtatcggcacggcgcgcggccgcagagctgcagactcatcctgtgagacggcgctagacatcctatatggacacaaatgcaggagcagggcgtttgcacatcgaaggcactgagatggaaacttaggaacagctatgattgtgggtcaggactcaggactgtttgagtttgtttggattcgaaaccaaaaacacgggccgctacgtcagactgcctttatatgagactatgtacgttattacatacatgtgagctaggcagaagtatttagatataaattgttgaattgttgacatgtttacatagaatctgtagtatctttactttgatacaagccagctatagtcttttctcttgggataagtatgcatttagatagctatactgtcctttagttatactccctactatgtacataactatgcatgtattgtaatttcaaaaatctgccacttatgtcatggttctgcctcaggtgtatattcaaaggcggtgtaactgattagtaccaaagagtcaggtgatccagggtaaccaagctagtccgtttacatactagtgctctatgccaagatgccaggtcgactgccatgaggaataataatacaacagtccagacctccagaccacggccttgatacttcttcatttcattggttttataagcgcggtgcttgcttcaccttcttgcgcctgactctgtcccttgtcgtccattgaatatctctcttcctcgccccgtcgggggtccctctcgccgccatgtcttcccgtaagtgctgcccgccgcccctcctctcccctgagatgcaggctgaccacccaattcaatatttctacagtcaagcaattcatccgtaatgtccgatcagcaaaaaccatcgccgatgaacgtgccgtcatccaaaaagaaagcgccgctattcgcgcctcgtttcgagaagagagtcatgactccagcatccggtaagcttcagcatctacctcaatcgagtactcgatcggcctctaacaattgataggaggaataatgtcgccaagctcttgtatctgtttactctcggagagcggactcacttcggccaaatcgagtgtctgaaactactcgcctcacaccgattcgctgacaagcggttggggtatctggggaccatgctgttgctagatgagaaccaagaagtgttgacacttgtgaccaattctttgaaaaagtaagtctccctgtagtacttgactgaccctgcgctaactaaatgcagtgaccttaaccactccaaccaatatatcgttggtctcgctctctgtaccctcggaaacattgcctcggttgaaatgtctcgtgatctgttccccgaagtcgaaagccttatgtcgaccgccaacccctatattcgacggaaagcagcgatctgtgccatgcggatatgtcgcaaggttccagacttgcacgagcacttcctcgagaaagctaagaacctgttgtcggaccggaaccatggcgttcttctctgtggactgacactagcgattgatctatgtgaagcggaagaagaggaagacgaggaaggaggaccagtcggcgtgatcgaaatgttccggccgctggctggaggactggttcgcgctttgaaggggctgactacttccgggtatgctcctgagcatgatgtgtccggtatcacagatcctttcctccaagtcaagatccttcgcttcttgcgtgtattgggtcggggagatgtggccaccagcgaattgatcaacgatattctggcccaggtggcctccaatacggattcctcgaagaacgttggcaactctattctatatgaggccgtgcttacgattctggatattgaagccgattctggtctgagagtgctaggcgtcaacatccttggcaaattcttggctaacaaggacaataacatccgttacgttgcgttgaacaccctgaataaggttgttgcaattgaaccaaatgcagtgcagagacatcgcaacacgatcttggaatgcctgcgtgatcctgatattagcattcgccggcgagcgctcgatctcagcttcatgttgatcaacgaagacaatgtgcgtgtgctagtgcgggaattgctggccttcctggaggtggccgacaacgaattcaagtccgtgatgaccacacagataggcatcgcggctgatcggttcgcacccaacaagcgctggcacatggacaccattttgcgggttcttaagctggctgggaattacgtcaaagaacagatcctgtcttcattcgtccgtctcattgcgactacccctgatctgcaaacctacgcggtacaaaagctctactcctcattgaaggaggacatctcacaagaaggtctcacgctggctgcgacatggaccattggtgaatatgccgatagcctactccagggtggtcagtacgaggaagaagaactggtcaaggaggttcgggagagtgatcttgtcgacctcttcaccaacattctcaacagcacctacgcctctcagattgctgtcgaatacatcattactgcagccatgaagcttactgtgcgcatgtcggatcccgctcaaattgaacgcattcgccgtttactttccagccggaccgcagacctaagtgtagaaattcaacagcgtgccgttgaatacaccaaccttttcggttacgatcaaatccgccgtggcgtgctcgagcgcatgcccgcgcctgagatccgcgaggaacaacgggtactaggtgctgcttccactactaagaaacgtcagagtaagcttctccgtgggaaatcgaccacaaaggtcgccaaacctgcagagcatgacctgctccttgacctggttggcggagacgctcctgtcacgagccctacctccaatggatcgaacaccgccgatctgctggcagacattcttggcggagactcgggcatgtcatctccctcgccggggcctgctggccaaaagaattccaacagcgccatcatggacctgtttggctccaacggtccttcgcctcaacccacacaacccgcatccgcctcgatggatctgctaggtgcaggaggcttgggtgcctctgcgccctcaccctccggctctcccgcgcctgtcactgcttcgacccctgcacacaccgcgctcaacaaggacggtctcgtccttaccttgcaggttcagcgaagcggtgccaacgcccagatcctggcccgcttccgcaacgatgccagcttcggccgattcactagcgtcggcttgcaggccgccgtgccaaagagccagcggttgcagctgagcgcaatcagcaaggctgatttagatgccggcgacgaaggcacacaacaaatgcgtgtgaccgctttgaacggggtatgtctagatctccttcctattctacattcttaagtctcgcactaaccgattatctccagggccttcctgccaaacttcgtctccgtcttcgtgtcacttctgctcgcgacggcggaaaccctgtcaccgaccaagtggactggtccgagccgtagatcaaatcggtggcagcgatgctaaaagtccatccgaacgaatgtttaattttcccatgaacagttaaatccacttctatacaccccggttatcgtgcaccttcttcgcttttgctatttatctagaattttgttttgccattgatttccttttctcctgtacttcgtttcactacttggagggagggaatgttcttattgtacatgcttcagatgaaagttttagcgtatgagaaagtgcagggtgtattcgcttcgagccgatatcctagcttactagtagtgtgttcctacatgtatgtacacatcagatactaatagatgttaaagtgcattgtgacacctataacgcagactaaatccaaaacatagaacgcaatggaatgaataggcgataaaagcaaggctctatgaccttcaaaagagaacccagatcaactgcagcctccgcatgagaagaaacaaaaatcaatatataatacccaggaaacaaacaatgaactccaccgcaggaaaccaaggaatgcaaagtcatatgatttatccaaaatccaaagcgtgagtccaatctataaggtagaaccggaatataccaagcaccagaatggtatataatatggagagcaggtctaagacaagtagccaagctaatcagatatgctcaatggggccttcgggaagtagcacctctccctctctccggtcaccgggcaaacaagccttgagcggaggacggacgatgtcattgaacatgaaagttccatagacaagaagcgcgaatccggcaacttggagccatttgaaggtctcccagccgagtccaagcgagacaatccagatgaagagtgtgcggcaggtgtcgattgtgctacgagaggtagcagacacagtgcgggtgacagacagaccgaagaagttgaagccactagaacgaacgttagaggggagggcggaaaaatggagttgagaagcaagatcaacacatacccgatactgatcatgataaacaagctggatatggcaacagcacggttattaagaacctcgtgcaatccctgcttgacatcaaagtagccatatcggccggcatcggtccgtccgacagcaagatacatgatcaccatgccaacgacagtaaccaaaaatccgaacacaccttcccaacccacaacatggatcggttccatggcgtaattctccaaaatccactcctccaacacaaattgtgtggctgtgaagatctgcgctgcggcaataagcagcacaccaatgatagcctggacagcctcgggggtccgagcaacgacacgcgcctgcataagaccatgcgagactgcattgctagcactcccatcctgagtgatatcgtggtctgaatctccactgaatagagctccggaaagacccacaatagccacacctagaacgacaatgaagagtgcactccactggtataagtggagcttgcggcgaaggaagaggacactgaacaggcctacaaatagaaccagggcaccccgggtcatctggtagatactggctgccacaaagagaagacccacgttcatgagggttgtgccggcgatatcgcagctagatggcgctgcaagaagtaggatcttccatccgcggagtgggatgcggctgtcatcttcgggtaggggcttggggtgtctgctatcgctgtcgagttcatcgactatgttgtcatcctcatgatcgatgccttcatcatcgccgtttatcgggtgatatccgccagttaggaggggtgaggggtcactggataggcgcggtgcgatgtattggcggtagaggaaggttaagccgacaactagccaacagcccatttcacccataaacattacggctctgcattaccgcctggtgtcagcattaatcgctagcgttgtaaggctgtatcatcggcacggggtggagcctacgtctgaatgactggctgctcgaacagctttcgctggctgggatctggggaatcgcagtttcgcacacattgcatatcctttttgagacgggccaatcaattagttcgtgtttctttgtagcttgaatcgaatcaaggacgcacctgatacttgttgagaatggtgttgcacaccccagtcacgagcatcatcgtgaccaggaggggaatgagggcatggttcgccatcttgtcccactaaaatagaactggttgatagaagttactccaagagttaggaagatggatgaagtgatcggagggtcagtgaggagacaaagcggaggtgagcttatctgagcttggtggctgatagcatttgtcacggtacccacaaggtactgtacccgccgacatgacttcatgtttggcttcatttggcacatacaatgtacgtatacatatgtagtacaacatgtccttgatattactctctagtgctacatagtatgtatagaatcctggttttccaaaaagaattatgaaattcaaaataaatgatccagttgagaacctctccaggttctttctccaaacgccatcgctgaggccaatggacaacacaaaaaagtccagaaatgattagaaccccaaaaggtcaatccctaaggatcacaagaaattaaccaagattcctgcgtggtagtgtacaaagcatcgctcctgagccatatatacgctagaaacgaattcgccgaaataaaatgtttcataaactcaagtccatcttcatgtaggacttagcactgtgtacatgctctcaattagacaagaaacatttcactttcttcaagtcatttggatgggaatgccttccctctcgtagcgcgcaacagcatcccagtcaacctcaagttggcccataggtccgatacccttgacctggatctcaggcgggatgcggatccactctgcggcccttgcaatggactcatcgtcccaaggttcataaaacttctccaggaaagcagcctcttcggcctcgtctgggggagtcagactagcaaaggcaacccagtcatcatccaccggagtagcttcattgatatcgaagtcctcgagcgagtcatagccaaggtgaggcagatccttgctcgcgaggttcgaaaaggtatcatggattgtatcaagtgaggtggggcactccgcccagggatcctttgtgtcgctatcatctagtttgataacatccttcttttcatctttgccagcaggctttgttcccttgacagtggacaactgcggagtgagcagctgagttgatgctgcagcaggagacgcagtcttggctccgaattggctagtgatcctagccatgggcgtgttgttggcaatgagaggggtagccatactttgttttaccggagaagctgctgcactaagcttggtggagggcggcactgatccgagcgtggctatctgctgggcttccgggctgtcgtcggggttcaacccaagacccatcgaaatactttcatggtaatatttgagataatcctcgatcatctcttcttcctcgggttgatggctttcttcgatgtgcttatccaagacggcttgcgtagggaatccttgatagtgatgttggcattcaaccacactgcatttgaaagcacctgccatggctgcagcattagatgtggcgtccgccaccgctttgttgtattttgccgctgcgccaggggctgcagttgcttgaatcggggacgatgccacgccatgagactgcttccgctttttggggggaggcagtttaaggttctcgggtgcaagtccacctggggcatactgagggacgcccctaggagatggggctgcaaaaggtgcagctggggcatttgcaacagactgggtagaggcgcgccgggctcgctgcagggcttcttcctgtgcctgcaactgctgcaggttggtcgcgttcagtgctggcatgttgccttgcattgcctgggcgttggaggtaggaggttgggaggcgttaggacgctgaccctgttgttgcatgcgagaaatcatcactgcgaacaactttcgcataaaaaggacagcaccagtgaggtaatcgggagtcactgtaaaatggtcatttacaacccaatcctgcgagggcttgaactgcctcatcaattggatacgctaagtaaaatcagattagtaaacaaacgatcatgatatcaagggggagcttaccatagcgaggaggttcttaacattcttctcctggccatgcatctttgcaaaccattgtacaagggcatctaagcggccgagaacatccaaggcttcacgcagttgtttagtcatggcggccttctgttcgggcgagacgggtataggtttcgcgggtggagcgttcttggcgatgtcattataaacctccataacttgggccggtaggttcctgttccatgcctcgtcggcggcagctctgctgagtacctggccccggctttgagactgttgcctccgcatgtgtgcctcaacctgagctcgctgttgaggagtcatttgtgcaagatgttcctgtgtgaaagggagacctggccgttggggggtcgtgcctggagcgcctggaactgccacaggctggctcatctggggcgtagctgtagctcgagcttctgccggatcatctgcgttgggtctcttctttgaggcttgcttcccggtagcacccttggcacctttagccgcggctgcagtttgagtctttgcgttcgccgcttgaggggtcgtttgcggcggttgaggatgctgtggcttgatttgggggacaggctgtactgcagggaccggaggttgagtgaccgccggttgatttagctgacctgggtgcgcgtttccatcaagttgcattgctctgttctgtgcagcctgcatcatctgcttttggcggtttcggtacagaatctcccgaatctgctcatcagtaaaggttgacgcctggggtccaagcttttgacgagccattgaaatgtcttgcgcggagattggccgcatggctgccatattcatagcagcggcttgttgaccaggagggaagcctggcgcattagtaaacggagccggagtgccttggaatggagttggcgctggaccctggccattcctcacttgattcgcagaagctgagatcatttggccaagatgaagtttctggagcatcatgagacgcgggaggtcgttggggcttgcaatttgagggttcgaatttgcccattgcttgagttggccccatgatttaacattgttagggacttgcatcgaagtgccattcatgttcagaatagacggtgggaaagatatgcggtccatttgcttggcctgctcaggggtcatctccacgccattgttttgctgccgcagcagttggagcttataaacttcgttttggcgttgttgacgttgcagctgagtcatttgctggccttgaggtattcccgagttcatatcctgcggggcacccatcgagcctctcatcatggcgttgcccatctggttattcatcattgcttgggcttggcccggttgatgttgcggttgctggccggggttggctcgagccatattattgagagcggcacgacgttgctgcatgataatagcccgagcctgttcaggaggcatacgagcgagttgttcctggatgtggggcggaatattgggaggcatttggacctgaccttgcatcgcagcctgtccagcaacgccagccgggtgctggcccatgtttgcaggtcgggacggtggtcgggcttgcgggggcacctgtaccggagacatctgacccggggccatgggttgattcagcataggcatgacggggctttgtccattcagttgtggctgtgattggggggtcacttggccaccatgacccgacatcgccatctgcgccttctgcgccgcttgtgcgcgcgcttgagcctgagactgtgcctggaactgcattcgatcctggggagcattgggcccaccctgcatatgctgttgctgggcaaggaactgagcctgggcgtttggattattggcgttcattgtcggctggccattctggcccatctgctgtgggaacatgttgttgttattattcgggaatggggcctggttcatttgagaagagcttgcaggaacgactagctgaccagcctcctgtgagcgcaggccatctgcttgctgtccttggatgttttccacattgccaatgaagttcgggggttccatcgtctgaccgggatttcccggaaatgcggaattgcgttgaaggtttaacatgttttgaagcatctgtcgctggtgttgagaattcatcatgggatctcccatcatgttaccattcgcatccaccccgccatttggcccacgtccccccatttctaaacgagcgcgacgatggcgtctgatctggttgagagcctgagagcggaagaaataggtcattggctcaagattcttccgtgccagatattgccgctgctcgggtgtcatgtttgataggttcattttgatcttctccatatcttccgggctagttttattcaacatctcgtttgctagtcgagagacatggtcaaggtcttgggctgaaagggtgctgaggtcgtcgaccatgggaattccattgccagggcgctgttggggtcgctgctgctgttgttgttgctgctgctgctgttgttgctgctgctggtggagcatcgcctgcgactgctgttgctgtcgctgttgctgcattgctgcctgctggttctgcccattcatgcccattgccatctgctgttggccagaaaccggggatgcctgcatctgattcatgtgctgcggaaaagcgcctggaatttgattctgaccagcgcccgtctgggacatcattccactttggtaagcgaccgcagcctgtctctctcgtgtgttccttatgtgaagaagcttttccgtgcattccttctcatattcgatcttctcgttggctttggtgaatgcttttaattcgaaactcatggccgcctgggccgcttggtggagatcgatgcgaggttggatcaaacggagggaggtgatcctaattcatgcaacggttaggccagataagagtgaacgcgcgaagccagttttcacaggcagaaggtgcaacttacatttgataaacattggtcgcccgggtcttgattagaacctctgccttccatcctccgtacggtccctgattttgcaacatttgcgcaacataggtcatcatagcttgcacactgtcgttctttgggacctgcatgtttggattcattctcatcgcagtattcggggctggccggccaggccccgcgcccgggttggggaactctccgggattcatagcggacaccccatcaatggtggacgggcaatccgcgaagaggttccgtgaaggttagcattcgctggagtaccatgcgcaactgtgacgatatcgcaaggttagtgagaagacgcaagtacggtgttcaacacgggtcgctgatcagcgggagaaaaaaaaggtaggtgctggtgtggaaccgtgattcgagtcgatcagggagggtggggatgggtggaaaatgaacgaaacggaggacaggagggactggagggaaccaacaccaacgtaatgaggagagcaaggcttccgggcaccagcgtcagatggattcaattcgctggccagcacctgattgtggcttggagcgaatgatagcagtttgtaggggagatgggatccgtgacagggatcatacagctttcaagtcgcaccgggcctcagttgctgtcctcactacacaatggcaagaagattcggggggagagaaagaacacaagtacttaccgagaatcagaatgccactaggacaaagagatgagtgcacagatcttaaagctagagggggggcaaagagtgaagtggcggtcgagtgaaggatattattctggtatggttattcagcgtattattcgcaaatgaatgagaagtgacgagaaggaaataaaggaaggactatgttttattcggccatcatcccattgagggtttgggcttacaacataagatgaagaataatagaactgactggggcgtgtatcaataggccggtatcttattcgtattgggcggagagtcacaaggctggctcggaggtacttgcagtttgcctgggtgtgcactgttgacccaggtatcccgaaaatacagtgtggttttttacctgtactgcaaatacatcactgccaatcctgatgatccaggccgttaagtacctgaaggctcaaaacaagtcgtcatcatggtgtggatcttaaataatgcccgatattgtacccatcatagataattacggggtatatgagggtgcataaaataaccccgtggatgtatatgctgtagacgaaaatgagaattcctctttattcaattaattattcacaaagctctttgcccaaggaaaataactagggaacagtttccatcaggatcgacaagggcgttctggccctgacctgatccggacgaaccaattggtcaaaatccagaaacaacaggaggctgtggctgggtaccaggtactccactatacacttgagcacacgaccaaagcaaagtcttcagtactacccggggacggtgacactgttagtcagagcttaagtcagccactctcctggccccgaaacgtcgaccccccatggcctgttctatatatacacttctgcctttcaccaacttacattcagtcgcctctttcatctgcgccctagatatctcgccatgaaaaacgactgaaacttgcttgtttttctcttatcggctttcgctgtttcttcagcatgtttcccttatctgtgtcgcccatctcggtgggttcgaacgtctttttcgcatttgccctcttcctcatctccgcacttgtgttacttctcctgcgacggtttctcaccctccgggccacccccgcgtatttaattgtccctatattcctagctctagctctgccagctagtgttgtgcttttggtccccatcgatttagcatccagttcgcgggatggatccggtcccaaagcaatctggctaccggaacgaatggttttggtctgctggcgcattgcctactggttaatctttgttctcacctggtaagtgtactgcgctcttcataaccaatggctgtcactcattcttatctctcttccagggttatcctcccattactcggtgaatatgtcgactcgggctaccgtgaaccgaaaggccggcttatgtactctctccgatcgaacgccaaataccagatgattgttctgggatgtgctctggtagggttgatctacgtttcaatctcgaatggcttcgaattcacatccatcaaaggtctcgtcatggcattggcatatgtgtggggtctcgtccttgccatttacctcatgggtcatgggcttgtttcgatcccgcgcaatctgctccgaaactccaatgtaagcggtcggctacgcagactccaggcccatgcgcccaaggtgcacgatcgcctgatggactcggtcaatgagttagcgaatctcaatggccaggtttcgcaactacaacgccgtaagacgggaaccgctcgtgacttccaggaatggattgaagagcttcgggaaggccacggccaatccgacgtgcgcgccccgatcctcgagtcacccgatacatccgcaacgataccttctgtcatcacggaacgctatctggccgaccttacacggcggcttcagcgtgctcggcatatgaagacccgatttgtagacgagtgggatcggctagtccaattatcagccgatctgcaagccatcattaattctgcagcttcaaagaagctggaatttgcaccggctccacgtcggtcatcctgcatccctcgtgtgaaattcctcaccccgtatatgcggtaccagctgtattccaacgtcattccctcggttcggttggccttaggtgcattcttcgcagtggcatcagtctgcattgtttggtcggaaatgatcaagtctttggcgccccatctctctgccgtgagtttgaccgtggtgcctcactggaaggacaatccagttggctttggtggtcaactcactgcctctgcctggctattgtacatgtgttcggcggctctcgttggtgtcagtgatgtcaaggtatggggaaaccgcgcgcttgtccgtcgtaatacatatggtgagagtgcctgctggtacgccggtcttgtggctcggttgacagtaccaattgcgtacaacttcttgaccttcttgccaaaagagtttaggcgaacgactactttctaccaattccttggtaaactcatcaacctgacccccctcgggaaaggctttgatttcatcttcccaatcttcattctcctgcctatctgcgcaacaatgttcaacctgtacgggcgtatcaaaaacatcttcgggtgcggccttgcagaggacgatgatatccacgatgtcgaaaacaaccctgccgggtatggcatgggtggctggcgtgagggtcgcgacctcattgaacgggaattgaatggcttcggttctctggcggtatcctcccgtggtggtcgctcaacgtgggcgtcggatcgtgatgatgaaggttcccctgggtcatccagactgcggctcccggttgcagagggctcccaacctgcccagaggacagttgttgcgcctactattgtagaaggcgaggatgaggaagacgagggcttcttccagtcctttgcgcatcgtgtcaaaaacacatttgatactaccagcactcctcggtggttccagggtgagccattccgacttccgcgctggatgtcgggtgataacaatcccacagaagaagcttcggcactattcggaggtcgggacgtgcctggtcgtctgcgcctaggttgattacattccggtccttgggtctcgtcaactgctggacagtgtaatataccgtttacttgtacatagctcaattcgtttgtcttgcttggatacaccagttccaattgaacatttttatatacgaaaaaattatccatgattaaagaaggggtattgatgctaccacccgccccccttggataataccatttccctctgcctgaaatttcagtagcgccttcctcatttagctaagtacctctagtttatatggtaaaaagacatacattttaattagaaaagaatcgctgatttctatatgattcaatcccttgattaatgaggtatttgatagagcagttaacgataaagcagtatataaagcagttgatataagatataataggagtgacttgattttattagggatatatatataaactgtaggtacctgctgtctatgcggtatatacagtaaattgggaggcggtaaggagagcggtaggcagaagcaagtgtcgaagcaggtacttagctaaatgaggaaggcgctactgagatttcaggcagagggaaatggtattatccaaggggggcgggtggtaactagcatctataccctttatttagtgggtaaataaaattggtttaaaaaaaaatgccctcgtccaggatcgaactggagaccttcggatttcaatcttgttaccaagaatgtcacattgaaagtatatgagaccaacgtcataaccaaactagaccacgaaggctgtcggcgagttgtctgatagaccactggagccgattatggactgttcccaatttgatagcattatactctgaacataactaataagtgagctacgcttgggcttcaagtatataatctatcccttcgatttggtcgatttttgttgaatatctaataaataaagtatgcccgttgaatctcttcatgatacaaaaataaataccaagttgtatatagtgtaccagctacccgtaagcgaccactcggggtggtggcgcatacgtgttacccgactatctgctgtttgcatgtttgctagatatattgtttgctacacagtaaacgatatgttcgaggcttgcaatatttgcaaaaagtcggctatatcaacaggctgcttcccactttgcaacttgcttcttctctcttcatcttcgttatttcgtcgaatgtattgaacgtactcttactgcttgatcgacctggcacctcataaactactagtattctcggttaacctcacctaactagttagttattctgtatagtttacctcgctccgcttagcaaaattaagctggcattcggatgtccacatatagatatggtgggactacaatgtagtggtgcgatgtaagagggagagagttgtctattcctaaggggcagaatgcccgactatctagttatggagggttggtgcctgccgcaccgggctgatggtcaggtgaccaccatgtccaacaatatatctctctcagacattagaaacatccgtatgacattttcgagtctttaattgcctgcaacaagcatggtcggccacctgtgtgaccatcttacatatttctagtacctcatgtccctttcccctttctccttcctcctttcctgatactcccccaaaatataccataaacagttagttgaggttttaaatcagtacaccactgttcagggccctcgagcaaaaccaattactactgtttccgatcaaattatgatcaagttcggaatacctaggatctcaaatttgcggccgaccacattgtgccctgggtcagcgacagactcaagctgtcagtttctcaaggcctctacctggaatatctcccactacctgtgatagatgcagttatgtcaaagtccaagtccactaagagaatatagaatttgtcaaattcaacttgaattcttcaactatccagttatctcatattccacggtgcatctactctcctcgcaagtatactaccctaatacagttcttcccctcacaatggacgggctaaccttccaaggcaggtaggtattgtatatacctgggccctcgggtattagtgtattatcacatgcacctgagtaatattacttgtcctagagtactacatgtaggtttcaatcttttaaggctttttctccgagtcatgctttatcccaaaatttggaattgagccctggagttttgtttagctgaattaattgtactattacctgtcgttgccttgattgactgctggctatctcattgatggattattcacccacgagccttggagcagcgcgaaagtctttgtggagtcgcggttggttgcgctcgattcattgacttgcaaaacaacacattggacctacttgcgtttgatatatatgttgcttgtcatgagaacggcgtagcggtgccgcctcgtcttgtttatgtatgtacatattcatctcgtacaatacggcaaagctcatatcaatagtcccaccacaatgcgggggtccgttctgcggaataaagaaacatcagtatgtaaataattactctctaaggacttatgtcgaccaaaacttttaccgctttaggacgacatctagagttgctgattcttgccatcctccgggacccttgcagcccgtgaatccttctccctgcaattgcggcaaagtggtaataacaggagcttatggaccttgaatttcttggtgccatcttttccctctcttgttccacatggacatgtaatctcgtgacctagttttctcagaatattgacttctgcttgtgtttcctgtaggcgttgcaattgcgggtcacgaccacctggaaccctgtagcatggccggcaaatgttactcccctcagacctatgccaggtctttgagacacctggaaagccctccacagcatgacacttgacacaaacatacggcggccttttctgaagctttgcaagctcgtctggtgttggagcaagcttctcagggccgtttcgatcgttgccatatctgaccaggtaggcataacatccgccgcaccgtaagctaacctctttccagtacaagagtggcttgccatatttaaggcggttgatattctcggtcacaggacaattgccattttggcatcttccgacgttctgcacgagaaagtccttgtcctcttgtcgtttcttggcgccaagggatcgcagttcaccggtggcatattttgaagcccggcaagccctacacaagatcatctggtattcatctgaccatgtgtaatccggcgcatttgggttctgtggagtatgacaatgtccgcaatgtacttggactccagccttcttatcctcgagccgcttttgctgagcctgcgcgttggccacatactctagcttgggcaaattgtgtttggaatctcggtcgcggtaaccgtagcaataggagcagatgaaaccagcaaggggatcatcctcccgcagcaggaaacgccgagtcatcgtgattgggtgactttccatatgactcaaaacctgtcggcgaagaaccgtgttcttacaaggaaaattgctgcactccgatgcccgctgaagatttgttccagggattccctgtttgagggaccagcatgagtttaatcctttccatcccggagaatacaggactggatctcgaatcacctcagctagctcgaaggtggacagcgtgctacctgcgtaaacacgtccatgccactgaaaagtgtcgaagataatcataaacagcccttctgcaagctgagcattggcagcatcaacacctgagccgaaaacagcgagtagcacaaacctgctcagagccccaggaagacgcgctctatcatagtgtagatttcgaacgccactcctgatactcaattcatggccggttcggcgtactcccccatgaccagtgaatcccacataaccatcacatccaaactcttgatctggaaaatcgccaggaacaaggtggcagtaattcaccatgcgttcatcagcgtaacgcaacaaaggaagagaaagtaggtcttcaaccatccacttgtccttctcgaatagtgctttcacctctggcagtgtaaccgagaggacattagtcataagtgtacccacatcgtatcgtcgcagaccgagaaaaaaagtccaggtgataggcttttctttcttgaagcaggaaaaggacattctctgagcccagtccagcagaggctcaatgacggatctcagggcacgctcaaacttgtccccagaaggtaaaccgcacgggacacccatgactagatgagcagacaacgcttcatcttggccatgatcagacactggagccgtgccaatgtcagccagaacacaagcactatgttcctcagaccaatctgcatcaggatcctgcaatcggtcatattcgtcctcaatatcagaaagatcaaatactgtgacatagttagcgagaacaaacagcgtacttaataatagggtgtatctcttaccatatcgatcttcgacctgatcctcgaccacagaccatggattctcgtgatgtggcactgcatcaacgcgctttatattgcccgcgatcaatgggctacaacgttgatgatttttttgagcgttgtcagaagcgtgggtggtatgattagctgggtgatatctctttggggcccgaggtatgtcttccctattgccgtccccgtgattcttcctcttattgctgggcggctccattgcgtccggcaatcattcaattcaaacacagaaaagatcttatggggtatatattggcccagtgagatagaccttcagatattggtgaagtagaaaagcaagagtgtactatactagtgtccaaatatgaatggatggggcaaccttccaacaatggaagtacctcttccaaaccgtcacattaccaaacaagattaccatttcgttcttatctggctatgtacattgtatactagtagatataccttttggacttgtgatgatatgattgtatattatctatgaacctatgacctggaggaacccaacagctccgccggcctcggcacattttacttacatatagagagtttgcataactacgactacagacgattaaagtatattccaaataggacatattattataattcttatatcataagacaaccccagtgctaattgtcaaatattttagaaattcgatcattgtttacaagtgtcttactggctgctttcagttctggtatatagtactattgtggggtgcaaatttcacaatcggctcaagtggtctatcagacaactcgccgacagccttcgtggtctagtttggtcatgacgttggtctcatatactttcaatgtgacattcttggtaacaagattgaaatccgaaggtctccagttcgatcctggacgagggcattttttttgcctttcctatttagagacgcgggtcatatctatggatcagaccaattatttcgggtgtactccgttgtagggttacttgccaagaaccgggtaattgggctaagcgcccaagcgacgattagattatacttagttacccggttcttgctaagtaaccctaccccccccccccctggtnnnnnnnnnnnnnnnnnnnnnnnnnnnnnnnnnnnnnnnnnnnnnnnnnnnnnnnnnnnnnnnnnnnnnnnnnnnnnnnnnnnnnnnnnnnnnnnnnnnnnnnnnnnnnnnnnnnnnnnnnnnnnnnnnnnnnnnnnnnnnnnnnnnnnnnnnnnnnnnnnnnnnnnnnnnnnnnnnnnnnnnnnnnnnnnnnnnnnnnnnnnnnnnnnnnnnnnnnnnnnnnnnnnnnnnnnnnnnnnnnnnnnnnnnnnnnnnnnnnnnnnnnnnnnnnnnnnnnnnnnnnnnnnnnnnnnnnnnnnnnnnnnnnnnnnnnnnnnnnnnnnnnnnnnnnnnnnnnnnnnnnnnnnnnnnnnnnnnnnnnnnnnnnnnnnnnnnnnnnnnnnnnnnnnnnnnnnnnnnnnnnnnnnnnnnnnnnnnnnnnnnnnnnnnnnnnnnnnnnnnnnnnnnnnnnnnnnnnnnnnnnnnnnnnnnnnnnnnnnnnnnnnnnnnnnnnnnnnnnnnnnnnnnnnnnnnnnnnnnnnnnnnnnnnnnnnnnnnnnnnnnnnnnnnnnnnnnnnnnnnnnnnnnnnnnnnnnnnnnnnnnnnnnnnnnnnnnnnnnnnnnnnnnnnnnnnnnnnnnnnnnnnnnnnnnnnnnnnnnnnnnnnnnnnnnnnnnnnnnnnnnnnnnnnnnnnnnnnnnnnnnnnnnnnnnnnnnnnnnnnnnnnnnnnnnnnnnnnnnnnnnnnnnnnnnnnnnnnnnnnnnnnnnnnnnnnnnnnnnnnnnnnnnnnnnnnnnnnnnnnnnnnnnnnnnnnnnnnnnnnnnnnnnnnnnnnnnnnnnnnnnnnnnnnnnnnnnnnnnnnnnnnnnnnnnnnnnnnnnnnnnnnnnnnnnnnnnnnnnnnnnnnnnnnnnnnnnnnnnnnnnnnnnnnnnnnnnnnnnnnnnnnnnnnnnnnnnnnnnnnnnnnnnnnnnnnnnnnnnnnnnnnnnnnnnnnnnnnnnnnnnnnnnnnnnnnnnnnnnnnnnnnnnnnnnnnnnnnnnnnnnnnnnnnnnnnnnnnnnnnnnnnnnnnnnnnnnnnnnnnnnnnnnnnnnnnnnnnnnnnnnnnnnnnnnnnnnnnnnnnnnnnnnnnnnnnnnnnnnnnnnnnnnnnnnnnnnnnnnnnnnnnnnnnnnnnnnnnnnnnnnnnnnnnnnnnnnnnnnnnnnnnnnnnnnnnnnnnnnnnnnnnnnnnnnnnnnnnnnnnnnnnnnnnnnnnnnnnnnnnnnnnnnnnnnnnnnnnnnnnnnnnnnnnnnnnnnnnnnnnnnnnnnnnnnnnnnnnnnnnnnnnnnnnnnnnnnnnnnnnnnnnnnnnnnnnnnnnnnnnnnnnnnnnnnnnnnnnnnnnnnnnnnnnnnnnnnnnnnnnnnnnnnnnnnnnnnnnnnnnnnnnnnnnnnnnnnnnnnnnnnnngcgatcgaaacggccctgagaagcttgctccaacaccagacgagcttgcaaagcttcagaaaaggccgccgtatgtttgtgtcaagtgtcatgctgtggagggctttccaggtgtctcaaagacctggcataggtctgaggggagtaacatttgccggccatgctacagggttccaggtggtcgtgacccgcaattgcaacgcctacaggaaacacaagcagaagtcaatattctgagaaaactaggtcacgagattacatgtccatgtggaacaagagagggaaaagatggcaccaagaaattcaaggtccataagctcctgttattaccactttgccgcaattgcagggagaaggattcacgggctgcaagggtcccggaggatggcaagaatcagcaactctagatgtcgtcctaaagcggtaaaagttttggtcgacataagtccttagagagtaattatttacatactgatgtttctttattccgcagaacggacccccgcattgtggtgggactattgatatgagctttgccgtattgtacgagatgaatatgtacatacataaacaagacgaggcggcaccgctacgccgttctcatgacaagcaacatatatatcaaacgcaagtaggtccaatgtgttgttttgcaagtcaatgaatcgagcgcaaccaaccgcgactccacaaagactttcgcgctgctccaaggctcgtgggtgaataatccatcaatgagatagccagcagtcaatcaaggcaacgacaggtaatagtacaattaattcagctaaacaaaactccagggctcaattccaaattttgggataaagcatgactcggagaaaaagccttaaaagattgaaacctacatgtagtactctaggacaagtaatattactcaggtgcatgtgataatacactaatacccgagggcccaggtatatacaatacctacctgccttggaaggttagcccgtccattgtgaggggaagaactgtattagggtagtatacttgcgaggagagtagatgcaccgtggaatatgagataactggatagttgaagaattcaagttgaatttgacaaattctatattctcttagtggacttggactttgacataactgcatctatcacaggtagtgggagatattccaggtagaggccttgagaaactgacagcttgagtctgtcgctgacccagggcacaatgtggtcggccgcaaatttgagatcctaggtattccgaacttgatcataatttgatcggaaacagtagtaattggttttgctcgagggccctgaacagtggtgtactgatttaaaacctcaactaactgtttatggtatattttgggggagtatcaggaaaggaggaaggagaaaggggaaagggacatgaggtactagaaatatgtaagatggtcacacaggtggccgaccatgcttgttgcaggcaattaaagactcgaaaatgtcatacggatgtttctaatgtctgagagagatatattgttggacatggtggtcacctgaccatcagcccggtgcggcaggcaccaaccctccataactagatagtcgggcattctgccccttaggaatagacaactctctccctcttacatcgcaccactacattgtagtcccaccatatctatatgtggacatccgaatgccagcttaattttgctaagcggagcgaggtaaactatacagaataactaactagttaggtgaggttaaccgagaatactagtagtttatgaggtgccaggtcgatcaagcagtaagagtacgttcaatacattcgacgaaataacgaagatgaagagagaagaagcaagttgcaaagtgggaagcagcctgttgatatagccgactttttgcaaatattgcaagcctcgaacatatcgtttactgtgtagcaaacaatatatctagcaaacatgcaaacagcagatagtcgggtaacacgtatgcgccaccaccccgagtggtcgcttacgggtagctggtacactatatacaacttggtatttatttttgtatcatgaagagattcaacgggcatactttatttattagatattcaacaaaaatcgaccaaatcgaagggatagattatatacttgaagcccaagcgtagctcacttattagttatgttcagagtataatgctatcaaattgggaacagtccataatcggctccagtggtctatcagacaactcgccgacagccttcgtggtctagtttggttatgacgttggtctcatatactttcaatgtgacattcttggtaacaagattgaaatccgaaggtctccagttcgatcctggacgagggcattttttttttttcccacatcctaaccgagatggaattcctctaatgcctctcttctatactgtacaacccttggatttgtcgatttttagtatgtttgctagatgctaggcagttagtgatactcgggacctactatatattaaattgagggttgggagtgctactgtttaaatattgaattcttttgcatctgtaaaaatacttaattaaatacaacgctatttgtgagctaaaggaagcctgggtgatttttctacagcgtatgggatacacctatgaaaggtgcttcaaagtatatgtatacatctcgaccacctctcaatagcggtccgtatttcgtgcacatggcgcgactctagcatagggacctgttcctaggtgtacatagttgttaaacttcttagtctaacagctcttcaatctcacctacattcatcatacacctcggcatctctgtagacctctatcctcatggtacctactataccagcccattgatataaccttggttgtatccagcatgtatctcaagtcttttctctgtctctagacaccagcctacgcttcattccccacttgttgttgcatccataggcggatagtttaggataataccattcatactgagtggatatcttccacctggctctgcggactactaaaaattgagttgcttcttcactgaaatggcttgttgtaatagacaagtgtgttttcttctcgccactcttcgtagcctgtatcactatcttcccaatcaactcggaacatgtatagtcgtcaatatctaccaatccggtgcttaacaagcagcctcgagtcaaatacataggtattggccgtaaccagctacatgggtgaaattagaagactgtacgatgggtcaggccgcgacaagcagccgtgtggcaagaccaatggcccggttatcaaaaatatatacatttctcaaacgtggtttacactggcatattcttgatttattgattgaagaacatcgtaacgaacatatgcaggtggtattcagaatgcaccccggctgatgcagctggactcaaatggatggactcacatggtactgtcgaatatctacacttcaaatgggcgcctttgtcaacctttacatagtcccctaacttaacttcttccacagttgaccatcttctcgcatttcaccatgcacccagacgtctttgtagacctgttggtatgtcagatcctggttcttgggtatttgatacgccatatatttgttactgtagaccagagagagatagtgccggcttttatagtagctgccccattattcttcttcatcttcttcttcatcttcttcttcatcttcttcttcatcttcatcttcatcttcatcttcttcttctactctctctctctctctttatgtcaaatacgtagcttgtcatagcagggtgtcttggagacttgatcaaggacaacttaggtggttatcaggtgagtctaaatgacatatctactagtatataatgtaggtatagatgacatggtaaccattgtatggtactgtaacggttccggggaagcactttgaccttaaaaatgttgccctatctatatttggacactagtatacacttgctttcctacttcctaattcccgaaggtctgtctcactgggttagtatatacctaataagttaatttctgggtttgaattgaattgattaccgggcgtaatacggggagtgcaatggggaagacatatattgagcccccaggagatatcacccagctaatcacactccccacgcttttgacgatgtagacgactttttaatataaccgcagattttacctcgcttgttctctttctatatatagaaagatcttctatacgggttatgcttctaattgccttcgcagtctatacacatatggatatgatccctgttattcttcattattcttttggttttaatactacgagtagaacgatataccacctatgcagataaataggatcattgaagtgctacatcctcttcggggggagaagccagccagctactcttgttacttgtattacttgtcgtagacagaaagatcggtctgaacattatactcatttctcgctaacttctttattttgcagctaattcttcttgtcttctgggcacagtaccggtaatttcgctactccccgtgaaccagtaatagtaagtggcacccagtaaacgccatggatccaagccaattcttgtcggctccttgcaaggaggagtgccaggaggtgcttgttggagtttataagcgaaagcaagttccttgcgaattgtatccagatccgctgtgggattcacatttccacgtagtcacatagtgtaattgctgttttcaaacgaatgtcgatcccagtccttggggatggagctggcgattggggacctattgccttggttggttctggcataggttttgctcccctttctagttcttttcgacttatcttgctagtctgttagatgttgatttggggggcattcatttactcagtgctctatatctccacggataaacaaagccctttcgttaatccctgaagtatctgtatacctgcatgctcgtgtcactccatcactattgggtcctaaggatcgaacattctttggggtttgaattctttcttctatttcccctaccccggctctgccataatagctagggctgacgtctgttggtggttatcactgtttcgattcgtgatagggaaataacaagaaacggaaaatgaagagagggacatggccacataaatggccggccatgcttgttacgaacaaaaagagactcgaatgtgtaaatataggtgtttctaatgtccgatatatatacatgcggacatccgaatgccagccacaatacacactgtataaaattttatttttattttttttgatcatgaggaactttagggaaaatttatttgttaaatattcaaccaaaattggctacatttggagggatagaatttcggttatttacttgaagcctggctttagtccatagtaccattaagtcgtgtaacttccataatcggctcaagtggtctatcagacaactcgccgacagccttcgtggtctagtttggttatgacgttggtctcatatactttcaatgtgacattcttggtaacaagattgaaatccgaaggtctccagttcgatcctggacgagggcattttttttgcctttcctatttagagacgcgggtcatatctatggatcagaccaattatttcgggtgtactccgttgtagggttacttgccaagaaccgggtaattgggctaagcgcccaagcgacgattagattatacttagttacccggttcttgctaagtaaccctaccccccccccccctggtnnnnnnnnnnnnnnnnnnnnnnnnnnnnnnnnnnnnnnnnnnnnnnnnnnnnnnnnnnnnnnnnnnnnnnnnnnnnnnnnnnnnnnnnnnnnnnnnnnnnnnnnnnnnnnnnnnnnnnnnnnnnnnnnnnnnnnnnnnnnnagttcccgggttcttgctaagtaaccctacccccattcgggtgtagccatggtatccctacacccgaatgggggtagggcaagaaccgggtaccgagaaaatcataacatacggcatgtcttcgttctcgaccctaagggcgatctagccgaattgaaacgagcagaaattgagcataattgtttaggaattcttttcaagacacattagatattgcacgtaaatgtatatgtaactagctcattcctcttcgtaatccatggagggttactcatcgaatttggtttacatcaatacagttgactatacaactagctatatgttaatatctgatgtagccgacattttgatacataccgaaagacaggggctgtatgaccccgcgtttttgcacatacatacgccgatcgaggtcagattgggttactcaaggccgagaaagagcctccatatcacgactaatgaggagctgcatgtaccttgataagatctccaaaaaaatacagccgggaagtatataaccatattcaggatagggacatatggatgtaaccggtctgccttgtgggagcatcgccacactgccaggcagcctcaaggtaatacaaggcacccatcaatttagttaccccaaccattgcaaatgtcgccatgattccgacgtcaaaagaattgacctgaattcagacgatccactaggcagacacaaccttgttgggagtatcactaaccaattgctatggcaaaaaactactctccgccttatctgcccattccagacgacttgggggcatgacttcaccgtccacgctctcccctccacagagatccatgactttactgcccccaatcctcgctcagtccaccttgggcgagaagtgcgcagtatacatagaccaggtcaccgataccctccccgttcatctacattccctccgccttcaactggaccccgttctcatctacctgtccaacacgccactcggccctcttgcgaaaaagctgccatttgctccagacgaccagccgatcgctctcctcgcagctgttgttatttgcatattcaccatcgtgatgagttggcgcaaccccttaaaaatgctccgccgctcgccgagctacgctcccgcatcatccaacccgcaggttagcgatgaggatttcagctacatcacaccttcagatatggcgggctcgcctggagatgaagccgacccggatgttatttcactccgtcaccgcggcactatctacccattgcgcttccgcgcatacgccattgtcgacggtctcttgactatcggagacatacgaaaggcggctgctgagtgcacaggagccgaacacccgaactgtgtgagactgctgtacaagggaaagctactcaagaacgacgcgcagacatgcaaagccgaggggctcaagcagcactccgaggtgctatgtgtggtgtctgacgcagtatcccagagcgatgtctccgatgataacggacaaaacatccctgtatctgcatcagcgccagcacccccgccgctacctcgccccactagtgcagggggcgcctcgtcccctcccacctccgcgggtggaaagagcaagaactcgagaaagaagaaacgcaatggcaagaagtcgcccgtcggtgcagaagcccccggtccctctcggtcgccacggcctacatcgtcaggccactcaggtgcccctgccgcatcgcctaacatcaagttgctgcgtactccgctggaacaggtcaatgctctggcggaatggttcgagcaggagatgaagccgctctgcgatgaatacattgcgtatccgcctagtgacaagaagaaacgaaactttgagaataagaaactgagcgagacgatcctcacacaaatccagttgaaggcggatggaatcgagccaaatggtgacgagagggcgcgcagtgcacgccgggccctcatcaaggatacgcaggcggttctcgccgagctggacaaacttgtacagccgggagatttgtaattggtctacatacatatgtagacacttacctccgtacaatatgtatcaatctcataccaagggctgttctaccggtcaagtttccattttgctgggacctgtccagcccctcggggtggcattggcatattgtgatatatcaaccttgctatttcccctactaaacctgtcggaatgatttgccggcatgtatacatacccttttcgtatttcccctctctttcttccattttccccgtatacccaaattgggggagctcacaggaggttctcaccgttgtctagatcactttagtggcatctcggaatgatcaacatggctcaggggcaatgcacggcccagaactaaagttgcgagaatcgagatttttcttaaatcatagtctattgaacatttagaacgattattgattaatatgctgtaagagagacatatgatgcatgcctgggaggatgcgataacaaataccgtagtccatcctccgtactccgtagtatgtactgagtggacttggtttccacctactattcccagtctggctacctttcctccagggctctccttagactctccctcttgctctttttttttccctatcttgatcttctcttctttacattctctcctcttttctcgaactttcatttattctacctccttgccataattggtaatcgacctctccttgcctcatcctcccggccccgcgagacctcgaagaagccttccacgggaccagccaccccccgccagcagctcttgtcgaaccaaacttgacaaactggaccccctgcagttgtgctcaaccctacggctgtgttgacaatttgctgttttcggtgtaccccttacgctctaccttgcgactctacctggaatggcttgacccgacaagtcaacccatctctaccgcaatctctactactgagccgggttacagctggactggcctttttttcatttgtgaacaataacctctggaatggcgggtgtcgctacagcggcatattccgcagatgccttagcatcgcccgtggatggctcgctatgggattttgcggtaccacttgtgcacgaggtaagattattcggtgtggcattctagtctctgacctggtagcccaagaatgtgggaaagaaaaaaaaaagcgctgatccccttttcccccgcaggataaccaccactcatcgaaacaacgtgagtcgcacgactcgaactcaatcggcgcaaaattctctcgacagcgtacctcgaacggctcacgcagctcctcggtctcgcgcaacgtacacgcacatgaatcgccctatctagcctcgaaccgaggacggagggaacccagtctcaatcgacatgggagtgaagtaggcagtatgcgagatgcttttggttccgaggcagccggtcgtaaagagcccgaagaggccgatgatgatcttcaactgagtttagacggaaagacgaaccaggaaaaatggatccaccgagacaagctggcaaagatcgagagtgaagagctccaccaagcagccattctcttccagcgacggatgagaggagagagcaaatcgagtgtgggacgtggaaggagctatgattcacaccagagtcctgctaacgggactggtacagcgacctcgcccgctgcagaatattccgaaccctggccgaaagtgaaagaagaacccggcaagcggggtgtgaacaacaatgtaggtggcagtgtgcgggaacattgggatctccgccgaccagaggagattgctgcggacgatgcagccgccagcctctacagccaccctggccttggaaaaagcgcctcccgaatacccatctctacggctagtccagttcccatcctcggccgcgattctggcagttcaaggagccgtgccgcaacagatgaagaagaccggtcttcacggaaccgtagagccagcgaacctatcaccatcgagcaagatggttcgactccttctccacaaagtcgaccaggcagtcgtggattcagcagtacacagaacacgggcaagaagacagtcaagagctctacgaaccgaaagacctctgctccacctgcgaacaggaagacgagcactcctcgatctcgcgctgtctccggtaacaacacacagcgccctaccacccggtcaggtgaaagtcgtcttccaacaaccgctaaccgacccgaaggagacccgccttggttggcaaccatgtataagcccgatcctcgccttccaccagaccaacagatgatcccgaccgtcgccaagaagatgatgcaggaacgctgggagaaggaaggccggacaccaaacacatacgaccgccacttcgcgcccctcgcagtgcacccattcgatacgccgcctcctgtagccaccaaggctgagccagaaccgcaaccacaaccgcaaccgcaaccagttgagtctctacagctcgaggatttgtcacctcggccatcaaagagcccagaaccgccccgcccgaatacaagcaccggctacagcaccatgcccaaggtgcaggaaacacccccaatgggattagcacctaaccccaaccccaactggagccctccagttgtcaccgcgcaacagctaccgaagaaagagaagagctgcgggtgctgcattgtgatgtgatggactctcactctacaaccatctgtccaatctctcttctatttccccaacatacttttgatatttgcacatctgcttgattcccttctctgtcatttttttattatttctagcgtctccggcgggatggtgttctgtcggttctgttctgtgattttatatccggcgatctagggcatttcttcgccttgagttcaaatttctccagactgctttttaatttggcatcctccttcaacaccagagcatggatattcttgtttctcttctcccatgcattcattccttgatatttcccttctcatctcctgtgatcattgtgattcctaccgaagtggtaagggggacctcaaaaagctcgctccagattgcgatggatggaatggggatgagagacatacacttcacaataaacataagttgtgatgtgcgcctcttccttcccatcctattacctgcctgtgactttcttgaccccatgattccctttcccttctccaatccttggatttctctccgaaacatctttgaagcctgttttcccatattcccaagccttcttactagcgattttctcctctttttttggtctggtcaggtggatttgtttgccttttgaatgccagataattacggagttaatcagatatcaggttaaatgaatgaacacatacctgcacaaaattactatttgacttgtactcgtaagcatgtagatactgcgccaactagcccaatatagatcaaattgtattttatagacatctacgaactatatgtaccttagctatctagactttacccaaacaagaaaaagcttcccggctgacaaatatcacatgacatcattgccgcatccaatcccgcaatcttgacggaatggccaaccaatcctctcatctttttgcttgtacttgtaccccgccaaatctcctataaaaagagacactaccgcctcctctctttcctcccaaaccgcccaccatttcgtccatctttacccgtcttttcggctccttcgccggcccaaatcccgccgccatgtccgccgcaaagactcgcgctcagtccctcattaacgacaacgctgtcgttgttttctccaagtcatactgcccttactgcgactcttccaagaagttgctcgacagcttgaacgccaagtacactaccctcgagctggatcaggatggtaggtcttttgcttttgctcgcgtgcgagaagaggagttttagcaccgagctagctatatttttgatacgttttttggtctctcttttgaatgaatcgctaatatgagtttattacagaggaaggagctgctatccagagcgctcttgccgagatctcaaaccagcgcactgtgcccaacatcttcatcaacaagaagcacatcggcggcaactccgacctccagggtaagaaggacctgaaggagctccttaaggccgctggtgcgatctaagcggtgatgtcatataaacaagaatctcccgaggcctgagtctgaatatagtctgaggtatatttcgtactctacagcctttattttatatctgccaatccagtcgtctcatagacttcctttcctaggtcttgtagatctatgtaatgtggggagatattttcatgccgtaggactggagggatcaaaagagccctgtcatctttcagcgttagatgcgtattgagtggagcattgctctggaatgtcttgtagtccgacatgggagaaaagtgaacagcgactaactcgtacaggtatgttgatacaaacaaacaaaatcaaagccataacccaaggataaatcagataaccttctgtacgacggttccaagtggcctctcaacaatcgacatcaacccgtcgacaatactcgtccgggccccttcacttgaaacagtcttgccagccaaataattcaaccaaacaagccgactaatccgctcatcagcgacacgccccatccacttaactggcttatcagtcccaggctggaagagcgcgtccaaagcgccatgcgcatcgcgcatcaaaaccagcgtctgtcccttcggcaccgactttcccttccctgcgccgaaaacagccttgaaatcattcattgaagttccgaagctctcatcctggaactcgctcggccccgcggtcttcttcgccttcgcgcgcgcagtgataccacgcacccatccgtcgcgcagatgcataaagtctgtgttacgagtgggaacgatacggaatgcagtgcggatgccgttttccttgatgatagcagaccaggcggcgtcgccgcggtccgcgtcaaggagaagctccttgagctgctggcgctctggcgagacgagggaggtagcggcggtagtgccaacaccggaaatggccgcgtcagaatcggtagtgagcgggtggattgctgtgtgcaggaggcggcgttgcagctcggttatgtcggatttcgcgacgtacaggccgaccacgtaaacttcaattgagaggaaggagacggtgcggacaccaaggccaagtaattggtattcttcgccttgggacggcgctagatcctcgccttcttgcttgccttctgttgcttcggatgtggggagtcggattgtgcttgggaagtgagggatggtgcttgttcctgttggcacttgctcgagtctgtcttggccttggatcgttattaatgatgggccgccgctggtgaagccgactggtccgtccatgcgcattgcgccattcttcggaggtgtggagatggtcttgtcatctttgctggtatctagttcgttgaggccgaagaggtctagcttgatcacaccgtagagaccgactgcacagacaatcatgccggctgcggagaggaccatctttcgctgagcttgggaggcatgctggagatccgccgctgcggatgctcgggagcggagggggttattggtggcattggagcggaggggagtggtggagagatggcgagaggagaggcgtgttgtgcggatttgttgccgagtgaggcattggtaagtccgccatgggttctgacggagggtggaggccattttgagcttcgttcgttcgatgaggaatggcgagggcaggattggcgggtgacggagatggagtgtggggatgcacgtgatatggcatgatctacattagtataccgtcatgtatcaagagatggtttcggtggaataaggaggtttttttaacttataatgatggagctctactcatctcatgtgaaagctggcacatcttgatggcagttacttaaataatcagtctctaacagaagggctgtggatgcactatgatatgactacgtctggtgcatgttgatatttacttgacaataaccttgtgagagccaccggtcacttcgaagattgctgtatcatcagcataggcaacttctcttatcagctgcttgccatcaatggtgatcaaaggcttcttcgacgcagtgacatagggcaaagtgacattcccaatagtacccttcggcgccgagaaagtcaacacatatccactagaattcaaagcccaagacgccttaaacttcccgagggaggtgacaaagccagcctcggcaaaatccaagtctccaaattgcggcgcgattttccacgtcaatcctagtggcgagaccacagagagaccgacaacaaactctgttaacgcagacgtcggaccagatgaccagccgtgtgcatgtgagacatatgatggatcatagccatatccgcggtccatccgatacccgaaagttccgttccttagatagccctcaattacagtgctctctgtaccattcgggttgttgatataccaaccccagctacgacgaatgaggtccagggcgcgtgcgggcttgcgagcaatgaagtgactttggatctcgaaagatgatatgaacgaagcaatgttctctggcaactcaggagctacggccccgatgggggtccagttcttgagaagcttttctgaaatgctggctgtgtgctcttcgtcaacaacaccgaaaataattgccatactattagcatcttgtggatgtagagaggtatcggttgcgttgtccttgaatgcgccgtacgactcgtcccagcagtaggtgttgattgcttttttgagattgacagcctgggagctccaagtgcttgagagattggctgaatctccagcccacaaagagagagaggctcccgtttgtagcgtatgatagagactagagcgtgttagctgtaaagccttctgcataattgattcacaacgtacatcatctgtgcttccgagttgttataaccttgctgccatctcgcccagtctcgcgtgcctgtcacattcaaaagcccgctgggataagtcacctttccataaatatattccatggcgtgcagataactggcccaattctccaacaagaagtctgtgtcattggtgtaaagcacataattataggtgccaatcatagaccacatatgatatgtgtccgagtccttctggctcaatggaggcccagactcatcaaatgcacctgttgtcttgttctataatccccagaactgtcagttctatgctaaaaatagaacaaacaaaactcacctgggtgttgtacataatctgcaaagcgtttttaacactttccaaatctcccagactcacaaaagcggaaggcacggcaatgcccatgtcaccaggccaaaccgcacgatctcgctttgccccatcaaccataatcgtgtctcctggcccgagagtcccattgtttgcccacccagaggtgataccctttgcaacacgaccagtagtcacaggcacttcattcgtctgcagagtatatgcaccgctataccagatgcggttcaaaagctcatcattgcagtgaaagtacccctgataagctcggagattcgaccaagtgggcttaaatgcgacttctaagctcaaatcatcaatttgaacactgcctgaattgtctgtgatcaagaagacggtcaagtatcggaacccgccccgcagatatttgtccggcatgatatatgtacccttctcagttgacgatatatttgcatacaacgcgccatcatgatagagagcgtttgatgagtccgaccactctccaatccaatttttggcttctgtaaatgctagccctagagctccgctaccggtggaggtatagtctagatggacgatgccaccgacttcaataccgaagtcgaatacaatgagtgatccattgccgtataattttgctttgtatggatgcgaggagtctgccacagcgttcgtttttaactccgataaggttgagactggtcgtactgttcgcgatgccggtgcgtatatgttctcttcccatggcccgctgaatgcagtgttcgtaggcccagaacaagaggtatcacgccagcaagtgtctgcaacagatagcgagaagagagaccaaagaatcaataccacactgcaccagtatgattgtgccattggtggttgagttgaagtagataaataccgcatatcgtaacagcataccaaccttttttaaatacagagcatagcacagatagaaatggctcgaccgtgcaatagtggatatgggaaggttagttaccccatattcgcgattggtggaagaatcagggcaaacgatgttaacacttgtaggactttggcaaggatcggcgaaacaagcactcataagacttcgaaatcatgtttttactgcataaaccatctagcctagtcttttctcgcagtaaattttctccgcaatgtcatgttgccatgtccgctcggtgtaaagaccgaccgagtgcaacatgggaaattcgagcaatgtgcggggttctatagctagggaatataagacctcgttttttattagaaaaatatccaattgagcagtccgatccgagctcacaatgcgattcttcggcattccttccctagccatgcctctatggctgactgtgtcaccatttgtatatgcaaatgaagaacgcagctcaaatgtttgcattgtcaaagccaatgggcaccagagagatgacgtccctaacatcctagaagccttccaacggtgtggcaatggtggtactatcatatttccagaggaccaagcctactggattggtactcggttgaaccccgttgtaagcaatatacaaattgaatggcgcgggaaatggacagtaagtgggctgtcactgtatccaatgataaacgcaactaatacgagctagttctccgacgatttggattactggcgtaatcactcatatccagttgccttccaaaaccacgctgctgggttcattatcacgggccacaatatcacgatcgatggatacggcactggtggtatcgatggtaatgggaacacatggtacacagccgagaaaggcgacacacagcccggtagaccaatgccgtttgtattttggaatgtatccgatgttagtgtcgacaatttctacgtcaaagacccccagttgtgggctgtaaatatcatgaacggaaccaatatgcgcttcaataacatctactgcaatgcgactgcggtagatgcaccatacggcgaaaactgggtccagaatacagacggatttggtatatccacccactccggtttcctcgcggccaactaacactatggatagacacaatggacgtgcagaatgtccaactcagcaatttcgtctaccaaggtggcgatgactgcgtggcgattaaaccgcgatcctacaatgtcgatatccacaatgtcacctgccgtggtggaaatgggattgctataggcagtctgggccaataccaggaagactcaagtgtggctaatatccgcatcgatacagtcaaggtgatccgatacaacgatgacatgcacaacagcgcgtatatcaaaacgtgggtcggcgcacttgtaccgcagagctcgtatgagaatgctggactccctcgcggcggtggctggggcagcattcggaatgtgttgttctcaaacttcgaagtccatggagccaatgctggacctactgtcaaacaggacaatggaaacaatggctcgtattcgggaacaagtttgatgagtatttccaatgtcgcatttgtaaatttcacgggctatattgagagtacttcgacgagtgtggcatctgtttcatgctcaaatgtgcatccgtgctacaatatcgattttgataacgtgattctatacccccaagagaatgcaacgacgccgggaattgggtcgtgcaagtatacattggaaggaggggtacacgggctcgatggatgctgaaaattcttcataccagaaacacaagcaagtaaggggacataatgtcagaatctaggatgaatactgtcatttttcatccctgatacagttggatcacgtgactnnnnnnnnnnnnnnnnnnnnnnnnnnnnnnnnnnnnnnnnnnnnnnnnnnnnnnnnnnnnnnnnnnnnnnnnnnnnnnnnnnnnnnnnnnnnnnnnnnnnnnnnnnnnnnnnnnnnnnnnnnnnnnnnnnnnnnnnnnnnnnnnnnnnnnnnnnnnnnnnnnnnnnnnnnnnnnnnnnnnnnnnnnnnnnnnnnnnnnnnnnnnnnnnnnnnnnnnnnnnnnnnnnnnnnnnnnnnnnnnnnnnnnnnnnnnnnnnnnnnnnnnnnnnnnnnnnnnnnnnnnnnnnnnnnnnnnnnnnnnnnnnnnnnnnnnnnnnnnnnnnnnnnnnnnnnnnnnnnnnnnnnnnnnnnnnnnnnnnnnnnnnnnnnnnnnnnnnnnnnnnnnnnnnnnnnnnnnnnnnnnnnnnnnnnnnnnnnnnnnnnnnnnnnnnnnnnnnnnnnnnnnnnnnnnnnnnnnnnnnnnnnnnnnnnnnnnnnnnnnnnnnnnnnnnnnnnnnnnnnnnnnnnnnnnnnnnnnnnnnnnnnnnnnnnnnnnnnnnnnnnnnnnnnnnnnnnnnnnnnnnnnnnnnnnnnnnnnnnnnnnnnnnnnnnnnnnnnnnnnnnnnnnnnnnnnnnnnnnnnnnnnnnnnnnnnnnnnnnnnnnnnnnnnnnnnnnnnnnnnnnnnnnnnnnnnnnnnnnnnnnnnnnnnnnnnnnnnnnnnnnnnnnnnnnnnnnnnnnnnnnnnnnnnnnnnnnnnnnnnnnnnnnnnnnnnnnnnnnnnnnnnnnnnnnnnnnnnnnnnnnnnnnnnnnnnnnnnnnnnnnnnnnnnnnnnnnnnnnnnnnnnnnnnnnnnnnnnnnnnnnnnnnnnnnnnnnnnnnnnnnnnnnnnnnnnnnnnnnnnnnnnnnnnnnnnnnnnnnnnnnnnnnnnnnnnnnnnnnnnnnnnnnnnnnnnnnnnnnnnnnnnnnnnnnnnnnnnnnnnnnnnnnnnnnnnnnnnnnnnnnnnnnnnnnnnnnnnnnnnnnnnnnnnnnnnnnnnnnnnnnnnnnnnnnnnnnnnnnnnnnnnnnnnnnnnnnnnnnnnnnnnnnnnnnnnnnnnnnnnnnnnnnnnnnnnnnnnnnnnnnnnnnnnnnnnnnnnnnnnnnnnnnnnnnnnnnnnnnnnnnnnnnnnnnnnnnnnnnnnnnnnnnnnnnnnnnnnnnnnnnnnnnnnnnnnnnnnnnnnnnnnnnnnnnnnnnnnnnnnnnnnnnnnnnnnnnnnnnnnnnnnnnnnnnnnnnnnnnnnnnnnnnnnnnnnnnnnnnnnnnnnnnnnnnnnnnnnnnnnnnnnnnnnnnnnnnnnnnnnnnnnnnnnnnnnnnnnnnnnnnnnnnnnnnnnnnnnnnnnnnnnnnnnnnnnnnnnnnnnnnnnnnnnnnnnnnnnnnnnnnnnnnnnnnnnnnnnnnnnnnnnnnnnnnnnnnnnnnnnnnnnnnnnnnnnnnnnnnnnnnnnnnnnnnnnnnnnnnnnnnnnnnnnnnnnnnnnnnnnnnnnnnnnnnnnnnnnnnnnnnnnnnnnnnnnnnnnnnnnnnnnnnnnnnnnnnnnnnnnnnnnnnnnnnnnnnnnnnnnnnnnnnnnnnnnnnnnnnnnnnnnnnnnnnnnnnnnnnnnnnnnnnnnnnnnnnnnnnnnnnnnnnnnnnnnnnnnnnnnnnnnnnnnnnnnnnnnnnnnnnnnnnnnnnnnnnnnnnnnnnnnnnnnnnnnnnnnnnnnnnnnnnnnnnnnnnnnnnnnnnnnnnnnnnnnnnnnnnnnnnnnnnnnnnnnnnnnnnnnnnnnnnnnnnnnnnnnnnnnnnnnnnnnnnnnnnnnnnnnnnnnnnnnnnnnnnnnnnnnnnnnnnnnnnnnnnnnnnnnnnnnnnnnnnnnnnnnnnnnnnnnnnnnnnnnnnnnnnnnnnnnnnnnnnnnnnnnnnnnnnnnnnnnnnnnnnnnnnnnnnnnnnnnnnnnnnnnnnnnnnnnnnnnnnnnnnnnnnnnnnnnnnnnnnnnnnnnnnnnnnnnnnnnnnnnnnnnnnnnnnnnnnnnnnnnnnnnnnnnnnnnnnnnnnnnnnnnnnnnnnnnnnnnnnnnnnnnnnnnnnnnnnnnnnnnnnnnnnnnnnnnnnnnnnnnnnnnnnnnnnnnnnnnnnnnnnnnnnnnnnnnnnnnnnnnnnnnnnnnnnnnnnnnnnnnnnnnnnnnnnnnnnnnnnnnnnnnnnnnnnnnnnnnnnnnnnnnnnnnnnnnnnnnnnnnnnnnnnnnnnnnnnnnnnnnnnnnnnnnnnnnnnnnnnnnnnnnnnnnnnnnnnnnnnnnnnnnnnnnnnnnnnnnnnnnnnnnnnnnnnnnnnnnnnnnnnnnnnnnnnnnnnnnnnnnnnnnnnnnnnnnnnnnnnnnnnnnnnnnnnnnnnnnnnnnnnnnnnnnnnnnnnnnnnnnnnnnnnnnnnnnnnnnnnnnnnnnnnnnnnnnnnnnnnnnnnnnnnnnnnnnnnnnnnnnnnnnnnnnnnnnnnnnnnnnnnnnnnnnnnnnnnnnnnnnnnnnnnnnnnnnnnnnnnnnnnnnnnnnnnnnnnnnnnnnnnnnnnnnnnnnnnnnnnnnnnnnnnnnnnnnnnnnnnnnnnnnnnnnnnnnnnnnnnnnnnnnnnnnnnnnnnnnnnnnnnnnnnnnnnnnnnnnnnnnnnnnnnnnnnnnnnnnnnnnnnnnnnnnnnnnnnnnnnnnnnnnnnnnnnnnnnnnnnnnnnnnnnnnnnnnnnnnnnnnnnnnnnnnnnnnnnnnnnnnnnnnnnnnnnnnnnnnnnnnnnnnnnnnnnnnnnnnnnnnnnnnnnnnnnnnnnnnnnnnnnnnnnnnnnnnnnnnnnnnnnnnnnnnnnnnnnnnnnnnnnnnnnnnnnnnnnnnnnnnnnnnnnnnnnnnnnnnnnnnnnnnnnnnnnnnnnnnnnnnnnnnnnnnnnnnnnnnnnnnnnnnnnnnnnnnnnnnnnnnnnnnnnnnnnnnnnnnnnnnnnnnnnnnnnnnnnnnnnnnnnnnnnnnnnnnnnnnnnnnnnnnnnnnnnnnnnnnnnnnnnnnnnnnnnnnnnnnnnnnnnnnnnnnnnnnnnnnnnnnnnnnnnnnnnnnnnnnnnnnnnnnnnnnnnnnnnnnnnnnnnnnnnnnnnnnnnnnnnnnnnnnnnnnnnnnnnnnnnnnnnnnnnnnnnnnnnnnnnnnnnnnnnnnnnnnnnnnnnnnnnnnnnnnnnnnnnnnnnnnnnnnnnnnnnnnnnnnnnnnnnnnnnnnnnnnnnnnnnnnnnnnnnnnnnnnnnnnnnnnnnnnnnnnnnnnnnnnnnnnnnnnnnnnnnnnnnnnnnnnnnnnnnnnnnnnnnnnnnnnnnnnnnnnnnnnnnnnnnnnnnnnnnnnnnnnnnnnnnnnnnnnnnnnnnnnnnnnnnnnnnnnnnnnnnnnnnnnnnnnnnnnnnnnnnnnnnnnnnnnnnnnnnnnnnnnnnnnnnnnnnnnnnnnnnnnnnnnnnnnnnnnnnnnnnnnnnnnnnnnnnnnnnnnnnnnnnnnnnnnnnnnnnnnnnnnnnnnnnnnnnnnnnnnnnnnnnnnnnnnnnnnnnnnnnnnnnnnnnnnnnnnnnnnnnnnnnnnnnnnnnnnnnnnnnnnnnnnnnnnnnnnnnnnnnnnnnnnnnnnnnnnnnnnnnnnnnnnnnnnnnnnnnnnnnnnnnnnnnnnnnnnnnnnnnnnnnnnnnnnnnnnnnnnnnnnnnnnnnnnnnnnnnnnnnnnnnnnnnnnnnnnnnnnnnnnnnnnnnnnnnnnnnnnnnnnnnnnnnnnnnnnnnnnnnnnnnnnnnnnnnnnnnnnnnnnnnnnnnnnnnnnnnnnnnnnnnnnnnnnnnnnnnnnnnnnnnnnnnnnnnnnnnnnnnnnnnnnnnnnnnnnnnnnnnnnnnnnnnnnnnnnnnnnnnnnnnnnnnnnnnnnnnnnnnnnnnnnnnnnnnnnnnnnnnnnnnnnnnnnnnnnnnnnnnnnnnnnnnnnnnnnnnnnnnnnnnnnnnnnnnnnnnnnnnnnnnnnnnnnnnnnnnnnnnnnnnnnnnnnnnnnnnnnnnnnnnnnnnnnnnnnnnnnnnnnnnnnnnnnnnnnnnnnnnnnnnnnnnnnnnnnnnnnnnnnnnnnnnnnnnnnnnnnnnnnnnnnnnnnnnnnnnnnnnnnnnnnnnnnnnnnnnnnnnnnnnnnnnnnnnnnnnnnnnnnnnnnnnnnnnnnnnnnnnnnnnnnnnnnnnnnnnnnnnnnnnnnnnnnnnnnnnnnnnnnnnnnnnnnnnnnnnnnnnnnnnnnnnnnnnnnnnnnnnnnnnnnnnnnnnnnnnnnnnnnnnnnnnnnnnnnnnnnnnnnnnnnnnnnnnnnnnnnnnnnnnnnnnnnnnnnnnnnnnnnnnnnnnnnnnnnnnnnnnnnnnnnnnnnnnnnnnnnnnnnnnnnnnnnnnnnnnnnnnnnnnnnnnnnnnnnnnnnnnnnnnnnnnnnnnnnnnnnnnnnnnnnnnnnnnnnnnnnnnnnnnnnnnnnnnnnnnnnnnnnnnnnnnnnnnnnnnnnnnnnnnnnnnnnnnnnnnnnnnnnnnnnnnnnnnnnnnnnnnnnnnnnnnnnnnnnnnnnnnnnnnnnnnnnnnnnnnnnnnnnnnnnnnnnnnnnnnnnnnnnnnnnnnnnnnnnnnnnnnnnnnnnnnnnnnnnnnnnnnnnnnnnnnnnnnnnnnnnnnnnnnnnnnnnnnnnnnnnnnnnnnnnnnnnnnnnnnnnnnnnnnnnnnnnnnnnnnnnnnnnnnnnnnnnnnnnnnnnnnnnnnnnnnnnnnnnnnnnnnnnnnnnnnnnnnnnnnnnnnnnnnnnnnnnnnnnnnnnnnnnnnnnnnnnnnnnnnnnnnnnnnnnnnnnnnnnnnnnnnnnnnnnnnnnnnnnnnnnnnnnnnnnnnnnnnnnnnnnnnnnnnnnnnnnnnnnnnnnnnnnnnnnnnnnnnnnnnnnnnnnnnnnnnnnnnnnnnnnnnnnnnnnnnnnnnnnnnnnnnnnnnnnnnnnnnnnnnnnnnnnnnnnnnnnnnnnnnnnnnnnnnnnnnnnnnnnnnnnnnnnnnnnnnnnnnnnnnnnnnnnnnnnnnnnnnnnnnnnnnnnnnnnnnnnnnnnnnnnnnnnnnnnnnnnnnnnnnnnnnnnnnnnnnnnnnnnnnnnnnnnnnnnnnnnnnnnnnnnnnnnnnnnnnnnnnnnnnnnnnnnnnnnnnnnnnnnnnnnnnnnnnnnnnnnnnnnnnnnnnnnnnnnnnnnnnnnnnnnnnnnnnnnnnnnnnnnnnnnnnnnnnnnnnnnnnnnnnnnnnnnnnnnnnnnnnnnnnnnnnnnnnnnnnnnnnnnnnnnnnnnnnnnnnnnnnnnnnnnnnnnnnnnnnnnnnnnnnnnnnnnnnnnnnnnnnnnnnnnnnnnnnnnnnnnnnnnnnnnnnnnnnnnnnnnnnnnnnnnnnnnnnnnnnnnnnnnnnnnnnnnnnnnnnnnnnnnnnnnnnnnnnnnnnnnnnnnnnnnnnnnnnnnnnnnnnnnnnnnnnnnnnnnnnnnnnnnnnnnnnnnnnnnnnnnnnnnnnnnnnnnnnnnnnnnnnnnnnnnnnnnnnnnnnnnnnnnnnnnnnnnnnnnnnnnnnnnnnnnnnnnnnnnnnnnnnnnnnnnnnnnnnnnnnnnnnnnnnnnnnnnnnnnnnnnnnnnnnnnnnnnnnnnnnnnnnnnnnnnnnnnnnnnnnnnnnnnnnnnnnnnnnnnnnnnnnnnnnnnnnnnnnnnnnnnnnnnnnnnnnnnnnnnnnnnnnnnnnnnnnnnnnnnnnnnnnnnnnnnnnnnnnnnnnnnnnnnnnnnnnnnnnnnnnnnnnnnnnnnnnnnnnnnnnnnnnnnnnnnnnnnnnnnnnnnnnnnnnnnnnnnnnnnnnnnnnnnnnnnnnnnnnnnnnnttgttttgtttgttttgattactaagttgtccatcagattgtcatgttttaggactattgtcagttttagagagttagagaatttattaagatttttctgccacaaaatacactcgccttaccaccgtttttccgtcacataaaaaccgaatctgaggttatctagatcggcaaatttgcttttcattgcgagtatgtgcagcaatcaccttgattctaggcataaggaacagagacttcaggcatcgtgttcttaaaaatagcattgctaatattgaatcagatttctgtaaccttgggagaaaaacaagacaattaatacttaagcataaatcgaaccataaagactgaccccgcagccccacctgagcacttccctatatgacgttcgttcccaaggttgattaataaattaataatgtcgctgtagcttcttttaacctcatacccaccccactgattgtctaagtccaggctataatgccacaggaaacagttcgacctgcatttgagggccgtgagcgcccacttctttcctatggccttgcctttcccgcagcgacagcacgccatcttgatgacatattccaggcttcccgtgtatatgtgatttgctcagggtcattggcgcgtaataccgatgtaatgaaccagctggaggctgctctggggccagataagctggttggtcattggatcggtatgcgaagccacactttgtggtcagaggtgctgcagattgccgaagaggttaggactgtgcatgctgatctgctattgaccgttggagctggcagcttgactgacggcgccaagatcattgcattagtaagtatacctttttctttcatatcttcattctgtttctgtttgcggtcttcttgtctcttcttatcattccctggaagacctatatatttatttaatatcagcctaacatccccttcaggcccttgcaaatcaagtcagtacaccagaagagctcgaaacacttgcagaaggccccaaaaagcgattgggaatcaaagctccaacgctcccgattatttctgtgccaacatctctctccgccggcgaatactcaaacttcgcaggcggcaccgaggaccgctcaaagcgtaaatacagcttccaaaatccaattcgcggaccggagctggttattctcgacccggagctggcgaaaacgactcccaattcaatctggctcagtacaggtgtgcgcgcaattgatcattgtatcgaaaatctgtgctcgacatcaggtaccactccggaatcagacaaactggctcgggatgcgctagggttgctggtccctggtctcttgcgctgtaagaatgaccgatcagaccgtgaggcgcacctacagtgccaacttggatcagtggatgctatggcagcctgtactagtgggtcaatcgaattgggtgctagccatgggattggacatcaggtaggcgattgctttcctttatttacattataagaaacccacaatgcaccaatgggcctggcttacagttctctagcttggtccactgggtgtcggccacggtgagaccagttgtatcctgctacccgctgtgtgtaagttcaatgctaagtacaacgccaaccgagaaaaacaagctagtgtgtgccaaattttgattcaagatccggtcgtgtcggaggtgctacgtgcccgctcggtcaacgtggaagcctctgacttgggcgatattttggatgctatcatccgcgaattgggaatgcctcggtccttgagcgatgtcaaagtagggcgggatcagttggatggactggcggagaatagcctacatgaccgttggtgcaagacaaacccagtaccactgaaggagaaatcccaggtactggaaatcttggaaatggtagtttaaagacgagataatatgctctttcacatttggataattgagacatccacggactaatctcggctttcaaataacccacctatcagttcagttgtatggctgaggtcataggggctttatatacttccgatggtgatgggattggcatatcgacagatatttctaaatgcgtcgctgtttcaggataacaataatagccgtcacggtagaaaaggcatgcatttatcaagtttcgttcaagtttctaaattacagttcctagttttggtggtggcaacgtcctatatctacactgagacatgtagacatcctaaccacttgggtatttccaaccctaaatgcattatacaacatatctttcattctacaatatctaactaaaatacagattaaatatgaagcttgggagcctctttcaattgattgataagcaggactccaccccccacatttcacgttatacataagctcgcgtcatttccgtctctaggactgcactgtcgacacagcaactatatacaactatgtctctcgccaagaatatccttctattcggcgcaacgggcaacattggctccttcatcctggacgccatcttgaccgagcgctcccaattcggccgcgtcgccatcttcacttccccgcacactgccgaaaccaaagcctcgcagctgaataagctgaaagagcaaggcgtagaagtgattgtgggtaatgtcgaagatgagaatgccgtgaaagcagcatacgaaggtagcaaaccctctcttcgtatccctacttatctaactgcccaaaccaccaaaccaaagactaaccactaagtcgaacaggaatcgataccgtaatttcagcactgggccgcaatgccctagctcaacagatccctctcataagactcgcagccgccagctccactgtgaaatggttcctgccctccgaatacggcacggatatcaagtacgggccagcttcggcgaacgagaagccgcaccaactgaagctgaaagtgcgcgcatacctcgaggatgagagctcgcgtgacgacctcgcctattcgtatgtagttaccgggccgttcgcggagatgtatcttaatctcgtgcctgggttggagacggctggtgggtgggatgttaaaggtcggagggcagttctattgggcgagaaggggaagggcgaggttagtttgacgacgatgaaagagtaagatttcttcccttcactattttggtgtttgtttcgttgggatggatgggctattggctaactattccgctagcgttggaactctcgtcctgaacactctgcttcatgctacggctgagacgcggaacgctgccttgtgcgttaattcgtttactacgagccctgaccagattcaggcggaatttgaacgccagcttgatggtcagccgtgggatgtgtctcgcacctcgctggcaaagttgcgcgaggcggaggctgcagcgtgggaggctgggaatccggcggctactctgttgactttgcgtcggatctggggtgaaggcggaacactgtacgcgcagcgggctaacggattgattggggagccgaaggtgatgagcctgaaggatgtggttgcgaatgagatccagagggtatcgaagttgtagatagcttgtcttcattgtttcattttttttcattatcttaatttttacatgctagttggccacacaacaaaggcgacatttgatctacatagacatcgcgcacactgtggaatccaacgtttaaagctcatcgcattcgtacgtaggaactaagaataaaagaaacatatcgggggttcaggtaacttcagatttcacatgaccgaggggaatgatttggaaaaggataaaaaagggggaaaagctctgccggatataaaacaaaaggatctgagctttattggaagaacttgcgcactctttcctggctagccgggtccacagaagccagaatctggtctgcatttgcgccggttacttgcaccagctgcttggcggatgtggccacccgggtagcggtctggccctgcagagtagccgcctcgagtgcctgaacgatgaaaccgaagacacggtcagccttggcaaagacggccgggttgtgcctggtagtaagatattagcatgagtatgagggtcttcatcaagaatacttactggtcaatcaactgtgcaatgaaggaataggcataaggagcagcctcctcgtcgtaggtaatgggcaaagtctcgatccagttggccacgacatcctgaggagcctgaaccttggacgggttgtagtgcaggatcttggcaatactggcagatgcattctcggtcgcgaacacattctcctctgtgcgggattgcgcatgctgtgtaacctggaacaagctggggaggctggctgccacaaattcgctccaggcggcaccacccttctgtgcggccacaccaactccatacgccgctgcctgacggttagcggcattctcatcccgcaaaccggaagccaaaggctgcatgatatgatccttgtatgcccacgactcttcaccacagaactcgagcacgtcatccatgatgcaaagagcccactgccgttgtgtcgggtcctggcttgtgataaaagcgtcgtagaatggaatcaattgctgccaggtcggcaggaacgtgttgccctggttcttaaagatggtgtggaacgccttgttcatatcgctcaataggttttgatcgtcctccacggcgtactcaaagtccaggttttcctcgtcaccatcttcaagctcagcctgctcctccaaacgttgcttcacgcgcatctggtagtcctcaagggtcgacttcgccgattcaatgaacgcctgcaagtgctggggggtgagggagtttctgccaacgacctctactgactcgtagaagcactggtacatctcagccagcgtgtcaaccgtcggctcagcgctcagaacctcgatgatcttctcggcaaccttgttccacatttcggcaaagcccggcgactggccaccgtgtgccttcttgtaagagttcaggagctggggaatcagcttggcagcggacactcgaacggggtcgtggaagaagaaggcaagaccagggactgcgatcttctccatggtttccaggacgtaaggctcgaagttctcctcgagaatttgggcatagatcgtgatcaattcgatagcggtattcttgtcttcaagagcactggtcttgataccaataatcttgcctttgagtggcactatctcccagccatcatcctgctcaacctgttcgatctgttcctcatcatctagcagctggatatcggccttggcagcagccacggtgagaagaggcggcataacaccggggagataaggtacgaagtctcggcctaagacgcggcacatgcggccccagcagtgaaggaggtactgtgactgtgggtcgtcggcgtcgacaatgttttgctgaatgtggccgagaatctgcacaaggttcagggcgtcttgacccatcttctccttaccaacggccagtgcgatcagagtagcacactccatggccttggcacgaagaaggcggtactccttaccctgttcctccttgagaacattgagcaaaagaggcatcaaagtggtataatactggtcgaaggcggcctcggcagaatcagcaatagtggcaatagtggacagcgcctgctcctgcagataacgcttagggctgcgcaagagatccaggagatggctgagaaggtttccgaggtatggctccaaggtgctgcgctccgcctcctcgcagaaattgacaagagcagcggcagcgtgggactgcacacgcggctcggtagaggcaagaacgggaatgatgttagtgaggacaatctcgtgatacttctcctgcatggtaccggcaaagtcggtgctcatctgaccaagagcattgcagcctgcataccggactcgggggtgagggtcttggagggcaggaacaacaagcgctaggacttggtcgagttcaccgaccatcaggtcgcgacaaccttcggagatagcggagatggccatcaaagcagcatggcggtcgcgccagttggtagacgacatcatgcgaggaatccaagagaatgcgggctggaggatggcctgtccacccaatttgttggcgagacgatccatgcactgctcaccggcgatgtggttgagatcgttctcttcaggctcaagctgttactggtcaatggcatgtcaattataacgacagaaatgccaacacttacatcttcagacgcgttccattcctccgcatcgtcgtcatccgcaccgacatcagtcatcagactcagacattgtgtgaccatttcctgtgcgaactccggctccttcctgcacatatttggggcgtaatcggcaaaggtggccatcaattcgagtgcgttctggcgcacctggtcactgagctccttgtcgccaatgacactaatgctgaacttaactaagttgttgaacatgaccttgaacatctttgggcagatttcagccaattcgatcagggcttggagtgccgaggacagttcctcgctctcagaggactccttgagaggaggaaggatgttgagaaggtctggcatgaggccgaagaatttaggctgggactttctggagattgaccggaacaacgaagcgaaggcttccatagctgaaattcgcacctgatgaaatggtcaaaattgagttcgaagggcatatccagatgtcgacatacggaaatattatcgtccttgaaacccttggtaaaaaccgccacaacagcgtcttcgtgctgctgttcaatgataccgggggtggtcgtgaacacacggtatgcggtttcccgcaggcccgagtcagggctctggcttgcctggaatagaacaccgagaagttcgggccactgttcgtctacaatcacaggtgaaatcgtcagaactaagagtcctcattttgtcaagggttgttcgaatcgcataccattatcggtgtattgcctcgccacctcagcgagtgtgtctccaatcttcttgcgtacatcggtgacggtctcactggttagacagatcaccaatttctcgcggatggcgattcgctgctcgttgggtaggctcgagaaaatctccctgctgtcacctgtggcgggatccttccgggtttttgtcgcgattcttcggaaaagcacagcggcgaaagcacgcatctgtaattaaaggtctcccatcagttattgatcccaaatcacattgaagttcggctgctggcctggtcgtcgatcgtttgcaacaccactccttcgaagcagccacacccctggagtccggtgtaacttactattgtgtcctctgcacccccaagctgttccgccaatcccatcaagaggacatctggtcggttcagaacccagtcattgttaagctggtcttccgcctgggatctgacgacattgtcgggcgtgctcaagccgcggagcagctgagaaagcgcggtgtggacttcgggaggtaggagggacatgttgggcgtgtctgttcccaagttccagacgatccaagcaacccagttctttcaaccctcgtagaagtaatttggtggggatagaggggtggaacgaaggaggagttttgtttttggtggggcggggagagagggaaaaaagaagaatttctgatggataggtccttggaagtgaagaagaacggaagtgccagtcgaataacacaacaagagggagagagattcgactgaggatatcgaggtcttagaatcgggtacttctcgacaaagattgcaaattaactgcacgaaaatccaaggacaacctacaaaagtccataatcgtatctggagctaagccaaatgcggtaatttaaggccacaaggccaactcagatcgaacagacacaactatgaagacctcaaacaacttacttatttgtacatacaaatcgttagatcaaagtcgacctcgaacaattatttgcattgaaggctaaactacctaggtaacgccgcaactgctcatacgaacagcggtatctgaacgcgacacggaatatcgatattagaaaacaaaacgggtatgcaacactccggacaggaaaagaatctactacgctatctcaggttgcttgatatccaagttgattgagagaaaggggagtttttgaagaaagagggtttcgggaatgccaaatatttttaccggtgaccggggcggctgagaatgaacacacccacaataaccgcagccaatgtgacaatagcaccgggcagcagcaagtcgttggggacaccggcaatatattgctcctctggcgcgtgcaagggcacgacttgtggctggggtagggccttgctcactggggagtcttgtgatgtaggttcctcagcagagctttgctcttccataggagtcacaatcttaacatgatgaggttcaaacacagtgttaggtgcctgggcggggtcgtggacaaataaattgaccttgtcgcggtgagtgcggcgggccagatcgatggcatccgtcatatcctggtccgtggtaatggagacggtatcgccttcgttgtccatatagctgagggcatatccagtgtggctcagccgaccctcctcaacagtggcctcgccaccaacatcctcgacttccttgccaagtttcgccgtgacttgcaacacaaggtcggtaatgccgctggtggtaaggacgttcacacggtgcactcgaccaccaggggctttgaacttgaaggggaatggagtaggagcggctggttctattgggtagtgctgagagatagcggaatgatcatcaccgtggtgcgatgctgagtcgttggggagaagactgttgtcgtagcctgagcgagtgaggtcgggactgataactgagcggtgtggggtattcagttgctggctgtggccgccagagaccatggagtctgactcgtgatccattgataaccaaaatttgttccaagcggggccctcgtcatcttgggttgacatggtgttgatctgaatacattagtcaaaatttttgcatgtcagatctgtaactttcaaacatacctgttcaagagtggcatatgtaagcttcaacacatccaccatgccaacgatttcaccaccctcgttcatcacgggcaggttaagatagtggccatctgttgtagagttagcatgcttcggtttgaaccgctgactgaaatgactgaccatgcatcttgcgaagtgcggcttggatgctcatatccgacggggcgaaatcggggtgaggagtcatgacacggacaacactgcaagtagatggatcaaggccaggagcaataacgcgaagaacgatatccttgctagtgaatataccagtgatcgagccttggtcctggactagcagagcagtagtgtggttttccttcatcagagccgcagcgtccttgacggtggtgcggaccgagacagtgaccggcggcaagccatccaagaccgtctcaagagtcggaccggacatcttggatcgcaatgcctccacatattggataacttgctggggctgactggagccaagctctgtctgcacaccttccagcgcatcgtacagcttgcgagacgaactgtatgcgcgctccaatttttccatagcatcgtagaagcacttggtaatatccaaaacaccagagatatcctgattctcatccatgactggcaaatgtctgaatccctttcgcaccataagatcgagggcatcggtagcgctggtgtccgttctcgcgcacagcgggttcttggtcatgatttcagcgacagagacgtctcgcgccttcaggcccattccgacgactcggaacgccagatccttggcagtgaaaatacccgagatgcgctcattatcgtcggtgaccaacacacagtcctctctcttcgcggccataagctgggcggcctctgcgatactcatggtcggcttgatctggagggcttggctgggcttcagggcgagcaccgtaccgggaggcgctttgcgggagctcctcgattttgccggagtattcctttttttgctgaggtcggcctccattttgcggcggatggccttgtgtcgagattagctaaaagccgaggctcaaattgaccatcaggagatcactcccgctagctgccataacgtacctcatcacgttttgactggttctgtcgctgtctgctacttgcggcgctcattgtgccagtgccagtgctagtgggagtcccgacgtcgctagtggctgttgtgcttataacagaggaatctggtctggggggtcgggggatgtgggaagcgctaggatcgctcgcgaaatcgggcagccttcctctcccgatcgtctgattgggtttcccccgaaaagtacctgtggccgacataataatgccgaaaggggaaagtctcagtaaaaaaaaagagagaaaggagatgacacaaacagaacaaggatgtcaagttgtgagactggtatgggagaaaaagcaaggagaaatcctaggaaggagaagaaaaatgggcagttcaatagtcgatcccaaacaggggtgttccttcgttagtcggggttggaggaaccataaacacggagtgacacggtacgatccggacgctagtctgaattaggcgaaaatactgctcgtgaccttttacacatgatccatgcgatacacgtgatccagatatatcatcgcctgagatttgaggcatcagccccgtgacccatctcgcttaagggcttagggctacccgcacaacggaatccaatccatcccgaaagagactttgtgtgagcgagcttcgacaacccactcccgacaagtcaactgtacgctatctacccccccctttcacccacagaccaatacctaaccatccacagaacaaaccgtcaaaatggtcaagaagagggcgaacaagtaagaccaacaaatccccccatctcggcgaaacagtatcccattcgacatctccgcaatgacgccgacggaagcgcacacgacatacatctctaaatacatcgaaaatcgcgacctacgcacattgccggacaagaagaatgggagactggatctcgattgattcgcaacctcaggggcacggtaactaattgatttgatagcggccgcaacaagaatggccgcggccacgttaagcctgtgcgttgctccaactgcgctcgctgcacccccaaggacaaggccatcaagcgcttcaccatccgcaacatggttgagtctgctgccattcgtacgtgacaactctctcgatacctcgaatatacgacaagatctcaagatctatggctacaaaccattcgaggactttcagatgtagcagtgcaactaaccgttctcgctttacaggtgatatctccgaggcttccgtcttcgccgagtacgctgtccccaagatgtacttgaagctccagtactgtgtgtcctgcgccattcacggcaagattgtccggtacgtttccaccgattgccctcctcgatacctagtcgcattccacgtactaattactcgttcatagtgttcgctcccgcgaaggccgccgcaaccgtgctccccctccccgtattcgcttcaacaaggacggcaagaagctccagccccctactgccgccaaggctttgtaaggagatgaatgtcgcacgacaaacaaaataaaatggaactagtttgaaatgaattcttttattttgtcttcactcttcgcattggtgttcttctcaaccggatcgcaggggtgatgctcggtcccaaaactgccggccatgcttctacactgaggatgaaaaagacggcaccaattgtgcgacgaaggcaagttggatgtctctttagcattgtgacgtttatgagcccgtttacgacggcttgttatgactgggaggaaggatggttcaagtccaagggaggactcagaaaatatcaaaaattcctacaaaacatgatcgcgtgacgtagacatcaattatcttgagtagctatgtagtattgctgggtatctgccaagtacgaaatttatgggtacaggtaccctttctcaaaatagtttccatacatatctaccgttccggtccgcaccttcggcattgggccccgcacgaccttcacctctcccttccaatggccttcgacataatgggagagagcaatatggggtgatgatggcatgagtaggctactcatgccggaagcacccgtgccaaccgtgtttcgccgccctctctcacgtcgaatcacctgctcatactcagcctttttgcggcgacgaaaggtcgcaagctctgctacaaggtcaatcatcgggacctggcactgttgctttctatctctagtagctcctgttggaccaggggtctcagcactttgtggatggtgacgcccgagtcgagaagaatcaggtgattgcaacgaagaagaatcgggtgaatacaacgaggcactctccgacggcataagcgagaccttttcgttaagcacagccatgggaaagtatttgccagggtcattttcggggactccacactcttcttcaccgaagaagctgaaatcatcggcggctgcagaccaaagattctccgagtcgcggtcaccagtgcttgaatgccctgtggcattatattggttcccgggtttccatgatgtcagcttggaggtatcaacaggtttaatttcaagaactagacgccgcaagccaaagagagatcgcgagcgccgctgctcggcttgcatgcgtgcttgccctggtgggagggagtagtctgatcctgcttgtagagttgctagtaatgcttcgtttgagcaggcagtaataaaccgagtgagcgcagaaagtattgaagagttaggcgtcacatgtgatggtacatctgtcagcaccaaagattccatgtgaggaatatgtgatgggtgtaggtaagggaaccagctttctcttcctccttgaagtgggattgattggttacgtggtcgctttgccaacaattcctgtactgttcgtgcgagagaatcgttcggcgagattggggagctgcattgcatggttgcctggagagagaagtctgccgcaagcttgtcgcagtctgaagccattgaaatggatggcaaggtgcttccctcggcctggtctgtatcccatgtatctgtcctagcactgaagaccgtaccttcgttggcgctactgtgtatagggattggctgtacgacctccggagcaaaagctgatccacgcctaaccgacgggccaggctcgtcctcataggatttcaatgcctgggatgctttcaacctttctgtcatggaagatgagctaattgagttggtcgttgatgtatctgcaagttcaaagacaggtcttgtctcttcgggcaactcataaacctgctgggaggtatccagctcaaattgttcgacttcgcgggggcaatcttgtgctgaaagctctggaagaaacttatcattggatgaagcgtctttagtttgtgattggcctgtgagaacagcatgatgcgctcggaaatatatcagattgtctcctgcaatcttacccaaaattgggactagcttttcggctcccgaatatttctccttccgataatgatgcgtgtgatgtgccttatccggtggttttagggtcccgaaatcgagagcatatagtcgggacgagaataaaagattcgccacagcttccagagatatttgattgccagtaatataaagatgtgtgattcccgtatgcggcaagtcttcaacccatggatgaaataaaacaggctgagcgagaagcttcgcaaactggtcatccaagtccggccgcttgaagaaatccgagccagactcattgattgcaaagtgcgagaagggatctggagaagccgtggcctgccttggactctcttgcatttctcttccgtctggcgggagaaaggatgactgtagcaggaatcgaattgccatgtcagtgagcatgttgtctctcaaatccaaacaacggactcgttgtccaatcgtattggctagaaattcggcgtcatcatctttcagcccaataccacgcaatttgagtatccggagaaacggcatctgagctagcgtagacagtacattgcggtctcgtgctggggtggtgtacgaaagatccaggtaggtcaatgctggaaacaagaggagagtatttgcgagacttgtggaagtggcattcggctcacgttcagccaacaagagccttatattgtactggttggacatttcatggggtttcaatgctgtcatggcatggtggtcaaagaatggtaacttcgagaccatcagacactgaagacatggcagacattcgagaatgtccctcaaccagcccggtcgcggaccaccatatatctccgagagagcgggtggaagatgaagggtatgggttaacgctcgcacctcttgtcgggcatatttgagtgttcttcggaatcgcgtgagagccactgtatgatccagtcaggtattgctttttgagcaatcgctgttgttcataagtttacttaccatagactgcatcattatctgtaccaaagtgagatgcaggattaccccagaggaagggcataaatagaccatgccatctgtggcagactaaagatgcagcgcataggtcgctggaagggatatagcgagcaataattgtccaagcatctctgtctgttgctgattcgtaagaaggaggaatgatatccatcgttgtattattttttccttctttcgatcaaaggcattgtgagttatacgaaaggtggtggaaatgcgagagggagtttggccccatgagtacctaggtagttgcccgactcagccacatagttagttagttctacgacagccttttgggatataccactggactcaggactccgaatattcttcataatgtttatgctttccccccctctcgcttctggctatctataagtatcatggccctttatccacgactatggatatatgacgtcactaaataaagcaactatgaacaggcgggggatagccggtctttgccctaatcctcacttattcctctgccacgcgcagagcccacagtgcttgggagagacttgaagcatattctacgtagttttgccggtccctactctcaacaaagggtagttagcatttcatccattgtcgcttagcatcacgcccgaaaaatcaggcataaataccccagagccgggatggtagcttactaagcatgaaactgagtcagcaagtgaccacgacttctcgacttgcgttgcggccattccggactcgagaatactcacgcggtcctcgaagtgcgatcgagggcttctagaagcagtccagaatatgtcagtgaacagaccccttgttgattccacttccttgtagccgaggcttccttgttacttgttattcttgtactcacctatgcaaagatactttggaatagaatgtatcccactaacatgtcaaatagtcgtgtgattagcaacctcccccagaggttcaccttaccatgtctgaagttcatggagattcagagctcgttccatcgggccctgatctagattatccgcttgctttggctccgcgacaagtaactttgcgagatcgggttaccgttgcgaccctgatcccttttacttcagcagaggaagtaccgcgggctctaatgaagtatctctctgaccaattcaacaaagagattgaaaagggagatacatatgctatgaccgagcccatcccattggctcagttcggacgatattggttttcgaactttggtgtggtcatgcttattggcgacatcgagagtgcagagcagacacatgcgatggaccgtgctggagcgaactggaccaagatctgtctaggtggttttcatattcgacctaattaccccggccgtagtagtcatgtctgcaatggcactttcatcgtcaccgatgctgctcgaaacaagggcgtgggtagactgatgggcgaatcctatctggagtggtcacctcgactagtgagttattcaccacgatcgcttcaaaagggctatgaattaatattttctagggatatacatatgcggtcttcaacttggtatatgagtccaacgttgcgtcatgtcgcctatgggattcccttggctttaaacggattggccgagtccccggtggaggcagtatcaaatcacaacctggggagtacgtcgatgcgatcatatacggtagaggcctcagcttggatggcgaggattctgtgtctcaggatcgttttgagaaaattcggtattatttgaagcacgggaagtaccctcgtggtgctgaccgggccgaaaagagtcgccttcgcagtgcggcgactcattataaacttcttggtggtgaggatggggagcccgagaaactgatgctgaaggataaggaggttgtgtcagacccgcagcagcagtacgatatcgcccaagaagttcacctcaagcatcatgctggaatcaacaaaaccacagcagctattgcgatcaaataccattgggtacgaatcaaagaaaccgtcaatcgcgtgattcgagactgtccacaatgcaaagagactctcaaggtgccccccataccagggaccaaagatgatgataaatcgccatcggaaacgatgtctggcatggatatggatagcacaatggagcagcccccgaaggacccaatcaatgtcccgcaggagatggacgaagcacctgatgagcctcccaattacaaccctcttatgcaccaacccattcctgcagctatgcccgatacagtccactccatggctgggttcgcacccatgcctctcgatcctcaaatcatgcaactacatcaacagttacgacgctaccaacaacataactctatgacgggacagttcgccccaaacccacacaatctcagcatgtcaagctttgacgacgcaatgcgctaccatacagccagcaatgcatatcaaatgatggtagatgacggctcggatccctttagacaagatgtgcttggacttgtaaacccaccctcacacgagttacagcatgatgctgaattactcgccaagttcgagtatggaagtccttcagacggaaattatgactttacgtgaacacgcctcaacttttatctcggtttctcattccgagggagttattgcatttcgggtttgctttgtcttaacttaaatttttctacctctctcctctattgttctattgtcgaccttcgaagccatccgtctgagataccgctaacactctaccattgtgccgtggacagtgaagcgcgctctctgctacggtatgctttttattgggcatattattcaaaagattatctctatccatattttaaaaactccatattcaatccatagatgtaaattctgtacatctcttcaaatgcgtagggtcgaggagccttgattggtcaccgccttgcgcgactgggggggcttttggggaacagaagctctgggaaattttggcagatcaacccctccgacctttcaactcatcataccccttttcttatttcatttatttttttattgaacggtttcgtgtcctaataccgatttaatcatggccttcaacggccaaacccccacgattgtcgtgttgaaagagggtacgtgctgtttccagtgcgggcagttttgttggtgggattctgtaacctatgctaactactgttcctatacaatctacaggcaccgatgcttctcagggaaagggtcagattatctccaatatcaacgcttgtgtcgcagtgcaaggaacagtcaagagcactctcggtccttatggtggtgatctcctgcttgtggatgccaatggcaaacagaccattacaaacgatggagccacagtgatgaaggtgtgtcttgctattgatgcaactatgtgatcggaggaagttggcgattctgacttgcgtgtattcggtagcttttggatattgtgcatcccgccgcccgcattctcacggatatcgctcggtcccaggatgccgaagtcggtgacggaacaacctccgtggttgtcctagccggtgagattctgaaggaggtgcgagacctcgttgagcagggtgtcagctcgcagaccatcattaagggtctgcggagatcgagcgccatggcagtcaacaagattaaggagattgcagtggacatgatggatgcttcagacagccacgaaaagaaggtcgagacactaagacggttagccgcaacagccatgaacagcaagcttatcaagcggaattcggagttcttcacaaagagtaaggcttccctaccctgtggttgcaggtttggccccgaggctgacgagatggtatcatagtggttgtggatgcagtactttcgctggaccaggatgaccttaacgagaggttgatcggtgtcaagaaggttaccggtggtggtctccaggattcgcttttcgtcgacggtgtcgccttcaagaagactttctcctacgccggtttcgagcaacagcccaaacacttcgagaaccccggtattgtgtgcttgaacgtcgagcttgagcttaagagtgagaaggacaatgcggaagtccgtgtcgagcaggtctcggaataccaggccatcgtcgatgctgaatggcagatcatcttcaacaagcttgaggctatctacaagacaggagcgaaggtcgtgcttagcaagctgcctattggcgatcttgccacacagtacgtgcttgctattcactatgaggcatgtgcctagacactaatgatttaatttgcaggtacttcgcggaccgagacatcttctgtgctggccgtgtggcctcggacgacttggaccgtgtttgccaagctaccggtgccgcaacccaatctacctgcactgacatccaggagcgccacctgggtacctgtggcgcgttcgaggagcgccagattggtggagagcgtttcaacttgttctccgactgccctcgcgctaagacctgcactctcgtgctgcgtggtggcgctgagcaatttattgcggaggtggaacgtagtctgcacgatgctatcatgatcgtcaagcgtgctctgcgtaacacaaccatcgttgctggcggtggtgctactgaaatggagttgtcgagctacatgcacgggtttgccgaccgtaacgtcccgcacaagcaacaggccgtcgtcaaggcattcgccaaggctctggaggttattccccgccagttgtgtgataacgctggcttcgacgctacagatatcctgaaccgcttgcgtgtggagcaccgcaagggtaacacctgggctggtgtcgacttcgacaacgagggcgtccgtgacaatatgctggcctttgtttgggagcccagcctggtcaaggtcaatgctatccaggccgcagtggaggcctcttgcttgatcctgagtgtggatgagacgataagtaagttccttctctttgctttccatcctcggaatcaccactaacctatgttttctttccaacagagaatgaggaatcagctcaacctggtcaacagcgcggtatgccgccaggtgctgcccagcgcgccctccggggccgtggccgcggcatgcctcgacgaggataaacgagtttgaccaaaattggatgatgctcgatgatattccccccaaaaaaagaaggacgtctgcatgattgagggccacaagcagttgaagcgaactctgcccaaagccggtgtttgtgagatgaatattgaatatgaagtacagggagaatagaagacgagttgctagagatgacccgagtgaaccacacagtctttccaggtacatgcaatataaacatagtcctcatgaaagtatttcctcagacttgatcaattgcaggtgatatatcagatacactttcttaaagccgagctggtccgcgctacgacggggtcttatacggatcctaataatatctacggagtagtccgtacgctgtaccccgtgctattccgtattttatttagaatctctgtctaggtagctatattccaaacacttccacccgttttacatcccattggcccattttcggcgccaagacagtgctattgaatctccttcagctgtatgacgcgcagaaaggggatctatttggtataaccatcgtgtgtgggatctagttagttagctagttatgtgtgtgctttgctaccactccgtagatactgttacaaaatgatccgaacaagtacaaaccttcaataaagtaagtgaggcccaatgaccgagggtcttgggcttccaggggttgatcggagctgccgatgaacccatgtcagatataaaagttagttcggattatgtcgtgttgatttgttgatttttttttcttcttttcttttctgttttcccctccttttctctgttttctgtttcttttttggttgtcttagtgtctagtgcctatccgaaacagccttataaggaaatagtggacgccgaacctctttgtaagtggcgagtttctagacgatccccgccaaattatctctggactctacaaatccccgaactgttcggacgctttctacttgatctcattctttgcatattttacattttccttttcagaatttatcttgctctcttcaaggcttggcttggcagctgccgtactcccgatctgttctgccttggatcttctcttctccacattcaacatcgcgttctctcctctacatctttacatttcgcttgattccctaggtggacttggggatttctctgatgtcttactatccaccgtactcgggcgcgccgggataccccccgcagcagccgtcatatcccccgcaacagcagtacccgtacgtttatccctttgctctattgagaacctacccgtctgacaaggatttgattgcagacagatgaatcagcagcagccctcttatggcggctatcccggccagtcctaccaccagcagcatcagccgccgccgcagcagcaatccaacccgtatggttacagccattcgccccagccatcccagtcctacggcgcgcctcctcctcagcaaggctacaatgtatgttatgatgagttttgccttgaatatacacgagattgacatgtatcaatcctccccaggctccgccgtctgggtacaaccagcacgccaaccagcaccctgggcaatcaatccaaggaagaccaggtatgcctaccatttcccagcttgaaaccacatcgctagcagtgaaagctaatcaggcggaaattaagcctacggtcaggccggcggtccgcttccccctcccagcaaccccgtcgccttcggtcacggcgctccccaaggctatagcttccaatactcccgctgtacaggaaagagaaaggccttgttgattggtatcaattatttcggccagaaaggtcaactgcgcggctgtatcaacgacgtcaagaacatgtcgacctacttgaaccaaaacttcggctatgctcgcgaggacatggtgctcctgactgatgaccagcaaaatccgatgagccagccgaccaaggcaaacatacttcgggctatgcactggctggtgaaggatgcgcgtcccaatgactcgttgttcttccactactctggtgagtaaaatgcctccatcgctgctatagcggtgaactaataagaactcaggtcatggcggtcagacacccgacttggatggcgatgaagaagatgggtacgatgaagttatctacccggtggacttccgggttgcaggccacatcgttgatgatgagatgcaccgtatcatggtgcagactctacaaccgggagtccggcttacagcgatcttcgactcctgccactctggctccgctctcgatcttccctacgtctactccacctctggtgtgctcaaggagcccaacttggccaaggaggctggacaaggcctgcttggtgtggtgtcggcatacgcacgtggtgacatgggcagcatggtgtccaccgccatgggcttcataaagaaggccaccaagggtgacgaagtgtatgaacgcaacaagcagacaaagactagccccgcggatgtcatcatgtggtccggcagcaaggacgaccagaccagtcaggatgcccagattgccgggcaggctactggtgccatgtcatgggctttcatcgcggcgcttcggaagaaccctcagcagagttatgtccagcttttgaacagcattcgtgacgagcttgcgaccaaatattcccagaagccacagctaagctgcagccaccctttaggtacgagtctcggattacttgaccgcaatcaattctgacctcccctacagatacggacatcctttatgtgatgtaaatggacttggaaatgaagataagggacgatgcttgtctggctttcaatgaagcatgctttcgtgtttaatgaattgccatgtatgtaattccaccatcggtgttccagtgaatattttgcctgtgggtggcgcactatttgtgattaatccttatgagtccttcttatgcgttgaaaatggagtgcagattagctaagcgtcggtctggaatcatcgtagacaactgccctgggcatctgcacaccaacacatatactctcactacgggaaactgcagttagcttcgttatctcgagaagatcaaggctccaagctctcatcaactatgtagacatgttcaactcgatatgatgggatccatcattggcggaagagctgaccgagtgatatggatggtggcgctgtacggattttataccctcaggggaccgtcatatgtcaattttgccccctaggagcccccacggaaattcatgcccccaactgatcttaatattcaatataacaagggcggataccagaaacgcaggacccgaatcaagcacaatgcagtcaattcgccagcaccgcgttctgcgcaggaagctccaacaacaatttgttacaaagcatgagaagcccgacaatgtctggactcacgagggccgctacgagtaccgcggaggagagatccacacagaacctggcgagccgaatgatgacccggctgccggacgaaggagggagcatggccatcgcacttttatatctgggccatccctcaatcctcgccattcagtccgatcacatatagagcgagaaggggatatcgagggctcggagtacgacccggtactctcaaccgatccccataccatcaatacacaagagacgctgggaaatacgcctgatattatggtgactggcgttgaaagaccccggccgtgtgacagtacgggcagtgagactgatatcgagtcattgaaaaagaacgaactcattatcgtcacatttgaaggcgagtgtgacataatggatcctcacaactggtcatttaaatgtcgactgtttacgactattctcacttcacttactggatgtgtggtcttctggtcatccacgatcgattccactgctctcatgacaaccaagcaattgtatcatactacctttgaggtcgagactttgcctactggtacgtggttaacactttgaatcgtttcaactagactaactgagatcatctagctatgtttctgattggttgtggagtaggcgcattgataacagcacctatatcagaactcttcggacgcaaccccgtgtacattcccaccatcatcgggttcattttgttcaacatgggcgcagggctttccgaaacagtggtgcagcgagtcgtctgccgcggtctagctggactcttcgggtctgccccggcgattgtatcagcagcatccctggtggatgtctggtcacgcattgaacgagtctacaccttcccgatctttgcgatattcatcttcacgggtccattggtggcaccaacaccaggagcattcgctgtcagttctgacgcggtaagctggcgctgggtagactggatgactataatcttcgcaggagtcctcctgatcccggttgtgctcttcttgcccgagacatacagcccgaacctgctgtactggaaagcaaaagagctccgccgcctgacaggcgacgaccgttaccggtctcccatagagttcagaaaatccacgttcacccaacgcatgtctacctcgttataccggccacttcagcttcttgcaacagaaccaattatcatgatccactcaatctacgtcgccctcctcttcatgatactgtacaccttcattgcgggctttgtctccatctatgagatgacaagcggcttcagcccggccgctaccgacgtcgcattcctggccattgaggtcggggtccttctttctgtactggcagtccccatttcaatgtggctggtccgtagagacatataccacagccgtgcgaatggcgaacagcgcccggaccccgagattagtctgtacatgggcatgttcggtgcgcctgctgtcccaatatcgctattctggatgggctggacggccagacatggagtctcgtactggagcccgctcgtcgcttcgggattctttggatttgggtcgttgtgtatcttcgtctcggcgtaccagtacgtcgctgattcgtacgagtcgtattctgcaagtgcgcttgcctcccttcagatgctgaggctcgtcgctgctggcgctatggctatagtcgcggagattatgtataaggagcttggcattgaatggacgttgactctctggggtggagtttcgttgttgtttttgcctgtgccttacttgctctactggaaggggtataaaatccgtgcacagagtcgctatgcgcgcagaagtgaacggagttgaggaatgtgtacatggaagccctggagataggggggattttaagttgctataaatcaggataattcagtactactgtcattactaatagtagccaatgactagttaactacatggttatacctacaaaatgactccgatttgccagtctcctagacagtacaatcctcagtatcatcgtggccctataatatcgttaatgactagtcataacgagtagtatacggtaccactcacacaatgcatattaatatgctttctgattgccgatgctgaaggcctatagaccttcctaccgttaagtatattctccccctagccataacaattagtaccagcggttatattgagaaagaggtcgaaagcgcacggtgtgtaagcgcaaacatgataatgaacgtcctagccagtgggatctctctggcagtgatcgcgtcagttatgtgacgaaccgtgttgggcctcccgtagagtagggttcgactctagcttctcggggtttccgttcgcagtccgtgatggtcacacttcttcccgccagctgtcgtgtcacttcgattgaatataactccaccatccacagcttctttcgggtttccacgtgcttcgctcccgacctgtcggaagtaggtagggagcggagcgcctagttaataccgttaccaggctgaggaagaagtcctcgggcgggaagccggttggcttgaggactatccacttcccatccgtaaatctctggagaaccctatcgctgggtgttccccctttcgaagcctgcttcgcccgtttcgttggtaggggttttgctccggagtgggacgaggcgatgctgggcataggtgacatcgtacttggaagcaagccagatcgttgtcggttctcaaggcatcgttgtgctaggagactccgggctgttctcacgggaatttgagttggacatggtagctgtaaagtagagcggttaggcatatgctagtcttataggctggttaaatacgcaccaggtaaaaaccgactcaagttagatgaggaacaaaccactcgccagagaatgaactcctcgtcacaagtcttgaccctggttttgtcggctatatcacagagcccgtccactaagcaaccatcatcaagattcccgcgaggccaatcgcattgcttttgctgttgttctatgatcatgttcggctgtggtcttgggtactatacaacctgccatctggtgcatcctctatatagcgcatcccaaatcggacctcgtccttgtagatataggtatatggtggtgcatgagatctatatatgtctatatagcccgggtggcacagttggcaaggactcagacctctcctagcgttggcgagagttgaaagtgcaccaggagaagggaacatggaagactggtgtttgttcctagcttgagaattgacaataagaaagtaggcgatggattaaattttttgtgaataatctcagatagggaagagctctgtaatataactttgataggaggatgatggcttggataaagggcctttgtttagatttctcgcgtcagcatatctgtgcaaatgccctggttgttttctttctctgcatcaaccctaatcttatatgaatgaacggataaagaaaattggggtttgattctattatatgaacaaaagagaaatgcagcaaattcatctcatttgtgggtgcactaacgctggctcatcgtaaattgggcgccgaaaatggctgtcggcggctggttcaaggccaaagtctgagatttataccttgtccaagatacaccgagggaaaagactaaaacgactttcatttaaggtgcgggaggttaaaggacggacgaatagaataacgtgttaataatagcttagtccactttccgccccacccagtctatacaattgtataaaatgcaaaaggcaggtgggtgaaggagtgaatttgtatgcgttgggagatgacggtgttggctccttggagcatttataatacattaataaagtattattagataatgttaagacgttattaagacgttattgaagctttaagaatgaattgtgttatagctactcacatcgacccaccctttagagcacctatgaactgttatacctggcatcttcagccatcgtgatcgacatttcaattgaaattgaggtcggtctttcggctggaagtgcgattggaagtgcgattggaattcgtgaccgaggggaaggttgaggccggggcccgatcagggaccaaagcaaaaggataattgtaccaagctagatatttcgacgattagatacgtatttgcaaagtcacaattttacctcgaactttctcttgttcaatataactgatccgaccgataattccatcggccacttgcaaatcttcactgtggcaggtaacatgcttcttcaagtttccagtcaggaaagggtgctaagaacagtaagctaagcatcgctccgtaggtgataatctagaagcaagcatgtgttatgcatttagggtctggttctctcacattgctgacactgcaccctggataacgacaatattgcgcgccaacttggataatcacacggtcatcctcatcctatgttgtatatcatattggtcagcctcttgtatacttcctctagataatcactcatcaagtatcacttgaatgcagttacctaccctttcatatttcggcatcacaagttccccagaagcaacttcacgaacgtaacggagataagcaggatgcttagctagaaatgttggacaggcattaaccatggtgtaatatgactgaggttaggagccaaagaaagcaagggaaatttctttaaaggttgcgagaatttgatggggtagaccaaaatgccgcttgcctaaaaacctgtggatctacaatggtctataagatagggtcacgtgcatgtatcaaaccagtcgcgcttcgactccaaccacgcgttcaacctcaacattcgatgtctgattttgggaaaacaccggccttcgccgtaatctaatccatggaaactgctagaaatctacactgcaatttatcactgaatccatgctagttctggccatggttccgttccgtgatgtccattatccttgaagacgatcacccccctgcggtgctccgtttcggtcccacatggtaccatgagattccttttttaccctatggattggagacaaccaatgatcaaggatctggatcacttaaacatgcagcaatgaaagctctgctacgggaccagtcggcgctgaagcctgagctgtttgaatacgttcactggtatttggcaaaatacctgtgggatgctctcaaaaagtagtaagtcatcattggagagttttttaaactacttccgcagattcttgagtctgcttgttcagatctgacgatctacgcagcaacaagcagacaatgcacatgtggaagataatggccagcaattatcctgtacaattttatgagattagtccttactactgcctcaatgctggctgtcccaaaaagccactgagagactacatgggtattctcaatagcgatgaccttcgctggcgtgcaatcctgacgattgcaaccacgtactgtaccgcctcagacttcaccactataccaaacatcaagaatttggttgctctggacatttaccgtgagaaatatgcgtcgaattcccccccgctggatccagtgggcgttagcaacgacttgcaagatggatttgtgcgtggttggattgagtccgaagcactacagcacctccgaattctcaggctctaccatcaatgcgaaataaccgttgcggcagtgggagctctacgtgagctaccggagctccaacttattgtggcgtacgagtgtaagaatatcacagagacgattcaaaaatacgataggcccgcgaataacatcattcccataaagggatggtcggcctgcagactcgattggtattgggaaactcacggaacgtcaaaaaccatcgacgataatctcttggccttgtttcatgtgtaccaggctagtctccagacacccgaagacgagcattcgaaaagaccatcatccttaccaacgaatctcccgattttggaattcaaactaccaactgtggaccacagcagaagagacaagattgttgtccgctctcgctataatgccaagtcaatcgtattgttcactcgagatcctgtgaagcaaaagtttgatatcgagaagcgacgtgcaagagacaagaagaggactgaaccacccgaagggggagatcgtcctgccaagcgagcagtcatgaaagagcggggaccgatggacatttccaagactttaaaccagttcttctgatggattgtctacgtaaataggcagagaacatgggttgaatcgcgcagtggaataacacctctgcgtcattttgaagcgatactccaacattatttcgaattttgtcatttggttagcggccataaagcatactacactgaccacagacatgttaaaaactagatgtggctggttcgtgggacttgctcatttcaatctgtatttcatgatgtcctatttaggttatgatatagtctgtttccaaggttcgaaagtgttgtaccttggaaggccaccccacatcacatgaggcgtatgtgagtcagtgctctacagacaatcgaataccctgatcgaattcattgctgcagcgtatggctttgctttgctttgcactcgctgaattttacggtctgcgctagaggaggctgtaaacagcatcttccaaggtcttcatgcgttgattatgccatatgttataatagatctttgtattctgaatggcccgtttagtcaccagtttattctgcatccgagtcaagatctggctcaataacagggaatgtcaaaagcgcagcgatgccacccagcccctcgagacgctttccgctttcatgatctgaactgagaattcgcacatcaccaccctctacatcgcggacgcggtccacaagcgccacccaacgtttacgctcagcgatatcctgtgatcggaacaagcgattcgaaacaatgagcacgccgccacctcggccgacagcaccttgttcaacagcgtagtcaacctcacgggggccataggtcgctttgttggtctccttgcgcagttgttctaggaagtcgtccatcaattttgtttcacgggcatacttcgtatcagccagcagactcttaacagcgggcgactggagaacctccgataaggaattcgtgtaccccgatgtggagtgcacaaccacaagactaggaaggagtcgcttgagcccaggagtcgttgttgatgcctcggattggatgtatttttggaagccagcggcgacgaacccgggggatgcgaggagcacgggccgtacagcttcgttgttggcgcctgaagtaagactggtattgaactccatttgtcgaagaagggtctcgagtgtaactttaaagaacttgttcattccctggcagtatgcgtcgttaatttcgagcccagacaatgacatgacagcagaaactcactttatcatgatcccctcctccctgccgtttccgcggcacagacatctcgatcttttgcttcaatattgtctggaattggccaataaagcagatatgagccagtccttcctgcatcactaccgcgacagcctctgcacggcgtttcccgccctcatccacagcgtccttgagtgactcaattgcaatactgtcccacccgacaccctctccatctgcgccaacctctttctctaacgtaaagttgcgattcaactctagatcgagggtatggaattgtccgattttcgtgtgcggtgtttcgttgataatttgtcctgatacatggagctgagagctctgcgggtcgaagtcgagattcttcacgcgaattacaaggttgagatgaacgcgcgccgagctcgtggacccggtatcctgaactgtggtaactcgacgaattgcgctggcgcgaagaatatcgcctggtcggatcaggttgtaggcgtgccactagatatagcgaattgtatatcagatgactgcggggtgctgagactgaaaatgagggattcaataccatgtcttctggctcatctgggcacaatgtcaccgttccagagccattgtgctcaattttgttcttgatgcaacgcatttttgcggtgatactgcacggttataggctgagggcttgggatggtaaatggcgtgttgttattgcgatgtcgtcatatgttgcctgaagatgcgcagattggagggataacagggttgtatgaaaatgggtcaaatcgtcgagcgctttagaatgctcctgtaaacatggatatatcgaacaaatcaacctaatatgagggcattgccgatgttgaacttgccaaactcaccccactatagaataatgccgtccattaccgcccggtcatcctccaagaatcccacctgttctgcagacgcactcattctgggcgattattttggattttcaatgggccatcagagaataaggaattgcggaatattctaatcctccagcgcatatattaaatcaccctgcgctgccagagtcacgagtcatgccttatcgataaagcctaaccctaatcagatcagattggggcatggaaagttgacgtcaaagcttgcagatgttattattggcagttccatgtggaatatgtaataacctcaatatgtaagccgtcaattactcatctgagccccacgtagcattcgtcagccattgatatagccgcatctagtccccttcatcgtccatccccacttcgatggcgtcaaagctccaagaaacgggcggaaatgactgagccgaggtggtccgtggatatcgaaacctttatctatcaagctaatcccctcatttgccttcttttacctttcaactatcaattcgcacatcatggctcccatttcgctgcagtctacctataagttggtctcgggttacgagatccccgtcgttgggttcggagtgagtatattggccccttagagttctgatatgtatgactgacacttatctacaaattaggtttaccaaacgtatgattatcgctgtataaaacccccgcgacagattatattgacttattcttgaatagtccctccgatgtcactgagaaggtgacccgcaaggccattgaaatcggataccgccatgtaagcaactgcaggacccatgcggcaatcgcttccagatttgaccatcctattacaggtcgactgcgccaaagtctacggaaacgaactagaaagtgcagccgctatccgcgggtctggagttgatcgctctaagatcttctatactagcaaggtgccctcgaaatgcatgggatacgagaaggccaagaaggccatcgaggaaagcatcgccgcggcaaaccttggttacattgacctgtatggatctccttgttctcctgaaataaaacatattagcgaactaacactgtgatattagtatgctggttcacgcgccctatggtggcaaggaagaccgccttggcacatggcgcgcacttgtggaggcccaaaaggcaggccacgtccgttcgttgggtgtgtccaactttgctatccagcacctcgaggagttggaagagtacatcaagagcggagcgggcggacaaatcaccgtcggccagtacgagatccacccatggtgcccacgcgaggatattgcggagtggctgcagaagcgcaacatcattgtcgaggcatactctcccctcgtgcaagcgactcgcatgaaggaaccagttctgcagaacctggccaagaagcacggtaagagcgaggctcagattttggtccgctggagtctgcaaaagggatacgtgcccttgcctaagtcagtgaccgagtctcgcattctggagaactcgcaggtcttcgacttcacgctatcggatgaggacatggccagtctgaagctcaactcgtacgcgcctgtgtgctgggatcccgtccgtgactgcaaaatctagatgacgtcactaaaataatcaaaagcctagcgtatggattggattagggaatcaaattctaagcatctcaaaacacactgaatatagatcaaaatatatagttagatcattgaaaaggtgcagcccaattaggtaatttgttgacttacgcgaccggcacaacgtatcaccgccgcgaaccaaaaacagcatcgacactcccaacgcgttcgggtaagattcaccacagctctctatccccatgatagtacacgcaggaggcagtcgctgccacggttgccctcactatgccggataaaccgcgtcgcgtcatattggagacatccaaagaagttaaacgccggtggcagcgcagcaaccaacgattccagttcaccgcatcccagatcgcacagctagatcgccgggaggagcgagaaaagaaagcgaagaagctacgcgagaaggaaaagaaacgcattgccaacaagaaacggaaagccgagcaggaggcgcaggcccgtgaggagcggaagcgtcgcggcatcccggatcccaatgcccgcgtctcctcgagtcagcctatgctatcaatgttcctaggggctgggaagcgacaatcacctgctgcaccggagcctgcgcctacagttacggagctcgaagcacatgatgacaattcggggagcgcgggtggagatacggaagctgaatcagatgacttggatgaagtattggaaaatgaactatctgagcttcaagatgcagatggcccgaaagagcctgaaggccaggatatcgcaaccgagacccgggcttcatccttggaagaagatgagttctcggactgctcggcgttcgacgacgaagagattttgaaaaaagccgacacggctgctattacacgagcaactgacgaagaaacgaagagcccccctatacccaaggaatcatcctacatacgaccttccccggctgtactcacgctagaatcatctttcgactctttccagtacgaccccgccgatttccttgaagccgaggcggctattatcacacaaacgaaaagtcctggaacgagagaccattccccacccaaggacacctcctctttacaacctcctttgtctgatcgaccgtgcagtagacccaccttggcgtcttcttttggagattcctttcgagacgagactgcggattggattgaagaagtgtttgcacgcggaagcggtgacccttttgacgaactcaataaagaagcctctgcatgattttacttgtacttggtaattcgctacattttgtctcgggtcttgcagctttggagtacctacaatgtatggcgtacatttccctgaagtcttggcattatggagatcgggtccggtccgacagtcgggtgatatccgcgcagttcggatacatcacaaggcccttcggttcgggagactcgaatattttggattagaagagatgaattgttccgtcgggatgaccagaaacagtctagaggattcagaacattgtgtacatttgtcttattattgtagtcagaatcttaccgggaatgacgttacatacctatcattctatagatccccagggctgcccgcttctttattcctttattccttcattactttatttcttcatctctgatcttggatcgatcccattcccaccggactcctaatccacaatgccgttcgtccaagcaaacagccatcgtctctactatgccgactctcaccccgccggccctccccaaaacggcctaacttttatcttcatccacggcctgggttcctcacaaaactactactacccagtaatcccgcaccttacgaagctccaccgctgcatcacactcgacacatacggcgccgcccgctccccgtacaccaatgacacaatcacgatccccagtatcgcagaagatgtcatcggcgcgctggactcgctgcatatcgccaaggccgtcgtagtcggccattcaatgggcgggctcgtagtactagagctaggtgcgcggatccccgatcgcgtactgggcgttgtcgccattgggccgacgcacccgtcagatatgttggtaggggtcatgaatagaagatcggatactgtgcttgagtgtaagtttttcccattcgaagcctgccgtgttgttttatttcatcatgtactaaattgtctgcagctggaatggagccaatggcagataccatcccgtctggagctgtcggctcgcgcagcaccccgcttcagaaggctttcatccgggagttggtcctaggccaggacccgaaaggctatgccgcgatgtgccgcgctattgctgccgcgaagccacctaactatgctgcggtcaaggagcctttcctgcttattgcgggcgaagaggacaagtctgcttctatggaggggtgccggtacatctttgagcatgtctcgagtgagaaaaagtccctcgaggtattgaagggagttgggcactggcattgtattgaggctgctgacgaggtgggtgagttaatcgccaagtttgcggattctgtgaatgcttgaatgcttgaaatagtctctatttagaacggaatgatgaatatgccagtaatcatgtttggctttttggttatcttcaatgctatcccgctatcgtaaagtacatcagaaatcacagaaatgctacttgaatgctgctgctcgctcatgcgccattggtactggtctcgaacttcactaacttgacatcatattcaagctcagtggcagcttgaggatcgcccttgcgcggcacaaagtccacgacaagcgagtccttgacagcaaataccgagtcgttgtcaaggtacttatccttgctgtcgaagatctgcgttgtcaaaggacggtaattatcataggtagcctaggcaagatattagcttctgtctcaacctgatatcgaataccacgccaaacttacaataatgtgaatgtgagcagggcggaaagggtgacgatccatcagctcaagaagcttgccagcaggaccatcgttgggaacggggtacggcgtcggacgcatgcagtagaacgaatatctgccatccgtatccgtcttgaacttgccgcgcaggttgaactcaacctgctcggggtcctgctgctcgtacagcccgttggtggaagcctgccacacctcgaccgtcgcaccgacaagaggctgcttggtctggaagtctacgacgcgaccgtgcatgaacgccatctcggcatcagcaggtttcgtcttgacgatattctcgccgttctcgcggtatggggtatcggcgcggaagaacggacccaggatggccgtggcggtgggtgcatcctgggcttcctcggcgagagtgaaggtgatttcgtcgacgagactgttgtgcaacgaatacatgttagctggtgactttgtttcactctcgaacaacacttcggcttacgattccagtcccagtacatcgcacaccagctgtccctcgttccgcttgtcgtcgctcatctgtcctgcccaattgagcatctgcacgccggccatccactcgtcgacggtgagctcctcctcacgcgcaaagtcgtgcatgtgcctgattagaccggccatgagcttccgcatgcgcggagtggtcttaggacccatcgcgttgatgacattgtccgtgaagttgggatcgaagcggtgcgtcgccattgttgcgcgtaaatgaatatgttttgctatgcgtatgagtgcggcttcaaatacagaaagcaggagagagcggtttaacaaggggagagtatgcgattatcgaaaccccttgagaccgttatataccacacatggtgatccgacgggattcccagtccgtggacctgaccaaatacatgacgcctattcgaggacaaccccgcaaccccacgccaatggcatgattggggtatggagtcgtcggatgtgcataaaagtacggtgtcagtcggtcagggacttcggaagaggttgcacttccgatttccccgcagtcgggtagctgcagagcttggcagggagcttggcgataaattatttagagggttggattttgatgggatgaaatgccaaagattcaatatgaatatcgtacaaatagaatgagttgtagggtgttttatatatcagaaagctacaagcagcttccgaaatcccaacgcaatacgatgtatatataagtgtcatggtatgttacacagctttagccgtcggaattaccgttatagtaagataacacgctgttagaccccagggcctttcggctgggtgaaacctcagccctataatcgaagtggggacaacttgagatggaaaggattccatactgtaatggtagatcattaggaggattatttgtattccccgtggtcgtctgtgtcgagctgaacaagtatatgatactccctacagttggggtggcatatctccatatcacactcatcgccgggccttgggattcctcttcgtaagagtctccggaagttcctgtagagcgcccccgttcgcccagagcttacccaacccgaccttacgctccactaccacatcgaaaaagtccagcgagacgaacttgtccgcctcgcccttttctgcctgcccactcgccacgagaggtatgccctcactaagaatgacgccattctcactgcgccataacggtacccctgcttgaagtgctttgcgcacatcgatataaatcaaaacctgtgcatctcgccgcataccggagatgacgcgcgagtcatcaagcttcggtttaccccccgcagcatcagcgtgaatagcaagcactgattctaaggaaggtccagtagcgaagtgaatgtggttccggcccatacagcgtagtccaccggattgtagaatcaaaggccaagtcgcgtggaacgtaccgtggacgacggtatcgggtagtttcgattcatcggacaaagaaagcggctcgaggaaagaggcagcatctacggccttgatgctgtggccttgggtcgcgcgaattaaaaaattcgacgggtcggtatcttcgacggctaatgcttggtcggtggctgtttgttgcgcttcgctcagtgcagactccaggacggatgttgtagcctggtcttcgcctaggatagcgccggcttcgtgctctgcatcgggggttgtcactagtgttgttgatgcttgggttctggatttggtggctcgcgcggatggaatgtgaagaagggcgaagcgctttttatcggacgagctcacggcatatagaatctcggggaatgtgacttttagcgatttgagcttcctccaattcaactggagtcagatatagtcagtatatcgtaggtcattcaaacaacaaagctgcataccacgtctggcacgctcgcataaccttgtgcgttcattttcagcccctccttctcagcggcatgtcgcagaagcaagctcaatgctttggagacttgaacatcgcgactttggccttgaccatggccacggccccgcttatctttgttgtctttgggatgagccatatttatcgagagattcaaggagttgttaagaataatattgtagtggggcactccaaatgttataagatgcggctctacaagacctcgtgtacctgattatctttgtaaatagtatctttcttctcattaaaataactttcaaggttaaaaacgataattagcggctggaaaaaagcccaaggtgttttggcgagatgtttaagtcagtcgccctctacacagttatttaggcggacttctgatgtcgaaatgacgcacatctattatctacatatcaggctaaatcctctttaatcattcttcttgtcaattgggtatagaatatcgcggaaacacaagctcatgacttagaacggccatgaaaatcatcaccgatcacagatgcagttacactctgctacgggacagatcttgtgtcgtttgaaccagtcattggcatgacttgcatggaacccatggttacaatggatgcaaaacaccacaaaccgccgcataacttcagtctcagtgggctcgcgagaacccgcctcggcatctgctgcgctactggcgcgtgacattggatctggcgaacccagccacaaagtgcagatgccgcaacgcggcatatgtcgaccacaccgcggacacacagtcccagacatgactgtaggtgctagagggttcccggcggtgggatgcacagtttcagcacccttggtagtggagacctgggaggaagcgtcgtgctgggtgagcggactcgtgcagtagttacaggtgagactgacttgctgcggcggtggtggcatgagtttgcgaccgtctgcagtcacggcgaaacgacgagagccaacgtcgaatcgggcacgctcgagttggagtttccaggagttcatttgccgccggtaggtctcacgccaggcctcaaactggacaatgtgtttttggttgctaacaagccgcggcacggtatggctcattgctagcacgggagtttggacatcattgaactttccaatataagattggaaaagacccatggccaaatgacccaagccagtgaggacgattccttcaatatcgccttgacgaattgcttggcttgtagcatccttcagatactcagttaattcgtcatctggaagccagcgtagcgcgacctctacgcgatacttcagaggtagtgtggtttccttgataactgcattccagtcgcctttgctcacaagggctaggatcgcccgggcgtatggatccgtgagctccttcgcgatttccgcacaagtatcctcccagtctgtgtcagtgtcccccttggaggcacccgcaatcgccatggctagcaatttatgtgcttgagtggggttgttgcttcgaagcccgaggtaggctagcttgggctcatcttggaagacagccaacgcagcggctttagtatgctggttttcgccagataaagctttcactgactcctctagttcacggtaggattgcgttgcaccacagatacgaaggcagagttggcgatggtcggggtaagccgtgtcacaaccttttgtctcaggaagattcaactgagttaccaagattgccactgtatccgcaaatgttttagcaccatccttcttattactaatacggcgttgttcgagaccattgcctgtgctctcgtcagttttgagaaagacttcaaacttaagcgaagacaaacctaggtcattattccaaacactgctcacacctagataattcaggtccaagccattgacgaccattgacgtcccggaagactcttttcgagcacctaggaaatgtattagatgtttgtttgtgtccccacggaaaaatgaaaaactcacgttcaatccagtcccataagtcttgtagagcttggtcatcagatgccacctttcggttttgatcctcatcaaacaaataaccctctttgcaccggaactggttgattgtgcatagagtgagcgcttcttcggcagtaagagggacccccattaccccgatagccatggcgcgttccctattctcgtggcttgggacaggctcgaaatcaagattctttggcacaaacagttcatcatttgcattttcctcctgctcttgcgaggctgagtagactcgtgatctgatttcttcgatcaggccggatatgggcgcaatgtgttcagaaagtgggtgaatcgatcgcacatctgagtcattcgatgagatcccataggccaatacactccgtgaagatagatcaattggtgcgcacgggggccgcgcggtgatgatctgaggttgtccattgccgtcgagtgcgatagaacttggttgaggggacaagctaatattcagggaatcgaatgaaacaatccggtccttttctctgtagccgcgagtcgggttatcaaagggtatgcatacgtcccgtacgtgcttggtgtatacggattctggataatttctggaagatccctgaccaagagtctcgtctatcgaagagcgatactcttccggcaggtagtctttggaaatgtcgtaattcttgaaatgaccgctgctggacagcgcagcgagactgcctcggttcgtccgcgaaaagcgcaagctccagatggaggatttcggatggaaaacattcttgagttccaaagcaggtgtcgtttgacccgagtctgtggcactggcagaagaaccaattgctggggatgttagtcgggttccaacgcggcggtcccatacgcagatggtgctttcatttgttggaatgcaagacgcaatgtagttctcatcaagccagtcaatagccagattatgtacacatcgagtggggaattgcaatgatggattgccgggtccctctgttacgaaatcagctccaccttcgtgaatgtgaaaccaggaaagacgaacctcttagatcatagatccgaacaaactggcctttgaccccagttacgattgtatcaggctggtcccggaaaaacttgatactggtaataggctctgagctggcgagcttccgtaaaggctcagtaaatcctttacttccgccagcaggactgagtcgttgattcacgtcccaaatgttcaagcaaaagtcgttccgaacgcgatcgaggcccgatgccacaagaccatgtgtactaaacgccacagcattgcagtaccgttggttgcggactggaaatgaaagagattccttggcatccccatcgaggcgtaggatagtagcctccccagacgactggcccacggcgatcaggttctcatttgaagtagaccagtcgaatgcgcgaaaaccgggtacattggtcagagtggagagcacttcatggcgtatatactttccgtcaaacccattcaccctacacagacgaaatgatttccccgtgacgtcgacggacaggaagcgttgttccgtggccgacgaggtcggggaccagcgaatggcagactccatgctggtccttttagcaagcttggttcagatataacctcagtagcatgggtatgtgcaaattgccaggtacaaaaattcaagcgaccaattggagtaaatcaaatcaatgcgacgagagagggccgttggtgatggtgatcaacggagacgctcattggttggcgccaatctggggggcgggccgataaatccgccgatatctttttttcttatcgtttttgctgtagcttcaacctctttttttcctttccttttctgtcagaccaacaaacatgtctacagacactcgagacccccgtgatcgggcagctcccccaaagaggaagtcccgggatgggtcagaggatgttcccccggcccgcaaaaaggtgcaccgcaaggccgacaaagcagatggccaagtccaattcgaggaatacagcagcaaaggcgatgcatcgaagcccaaagtgacccggaaatacaaggacaaatttgctcccaaacctgaaaaggaatacccgtcgatcaacgatctgaaaaagcgaattcgtgacgtgaagcgactactcaacaaaattgatttgtctgccgatgctcgcatcttgcaggaacgtgccctcgctggatatgagcaagatcttgcggatgaaactacacgcagagaacggtcatcattgatcaagaaatatcactttgtccgattccttggtatgtggccgatatgtctgaatgatcttgtgattcccgctaacgtactgtgttcttatggaatagaccgcaaaactgctaccaaggaactcggccgattgactcgccgcgagaaggaagagggtctggattcgaaacaaaaagctcgtcttgcagcaaagatccaccaatgccgtgtgaacctcaactacacgatctactatcctctcacagagaaatatatttcaatctaccccaatggaaaaccagacgcaacggacccaaagacagaattgcaaacgcaagaaaccaaatcggacgatgccaagcccccgttgtggtccgttgttgagaagtgtatggaagaaaagacactggaccttcttcgtgaaggaaagttgcgcatcaacgccaatggagagaagattcaagctccgtcgtctggcacagctacagctacggatacccacaaggagaagagcaagaagaaagatcaacagaaagataccgatgctacccaaaaggacaagcatgtttccaaagacaagaatagcagcaagaaggagaagcctgtacacaacgagcgggctgctaagaaacacgaggcaccacagcaagccaatgcagaggatgaggatgatagcgatggtggcttctttgagtaaccgattcataagtttgatcattggtttgtgtcttatttgtcttgatatccacactagcattctatacattctattgcaatataaccaagcgacctgttcaaaaagttcaccgtgtaataaccgggttctccacctgcatacatcagtgcctgtgatgtatgcccatagacgtatagttgttagccggaacacgaataaccgattttactttataaggaataccatctgttgcatgtacgaacggccgtccaaacgttgtaatagctattttgaactcacaccagtctacttagcgatccgccacccagtgcgtattgtagagttatagttcgtaacgcgattaacgcaataagtatgtataagttggcttattcgtttactttcaacctttcaccttcccatgttcctaatcaatcctcatttttgcaattagctctgctatcccaaccttcgttgcattgagctagcttcagagtcaatgcttcaagtagcttagggctacataaccacatcaacctctcacgagttcacaggctgcgaccactggatcaatacctgtgacctcattactgagatctgaattcgcgtctatctcgcatatctggcttttctacacatctactttgcgttgttgtgtctctcaattcgactttcatacttgtcgccatctcattgtgacctcgctgtccactacaggtaagatatcttgcaagattaccccctttatacttcgatctatatccttatgctctattcatgttcaccttacgatgtatcttgctgcatatggcgacttccatattcattgacctcctggctaacaaagcgcagatcttccaatccattctgaattctttcaagtcaagtcaagatgcctccagagaaagaggccagaatggcctgcgacatgccaggtagagcagacttcctcaaacaacaggaaatccttcgggatcattgcgcaagcgccctcaaggagcacctcgaagacaatcccgatgttatttggacacccgaagatggcgaaggacagccccccaccacgaaggaagaagaaactcagctcaaactgatcgtgaacatcgagttcgacccaaaaaccgacaagccaatcttgcctccgatcaacaaccgactatcagatgagttggtctatcttgtgagcaaattcacgaacgccctcgaactgtcacgtcgatacccatacgacttcgacaaaatgggccatatcaaacccgaacgtgtgtcttcaggaccttcccctatcatctgggctcacggcctccctttcttcccaatctacaaagggtattacatcctctgtggacgcgaacacgctaaatgcattggctggttgctccatgagcgaaccagggagatcatgcaagccaaccccagctggtctgttggggcggtcatcgcacctgaaactgccgtgagtgctcagcatactatcactcgtcagatgacacagcacaagccttatggcccggagagagagtcgcgttacaagggcaaagcctcggctcgcgatttcgtggctgcggagcaccatctctgcgctgttctgccggacctgatcacccgtgagattgaggtcggcccgttgtggcaagcctggggttacaacgttcgttgtggacctgtgatgcgtggcgtgagaacaactatcgtcccgaaggagtttttcgatagccatggtctcgaagatatcgactatgaacactttgctagaccgtacgggaaccacctgttggacgaggatgaagagaccgatgatgaaatgaacgcaggtggtggcaatcatcctggagatctcgctggacagagtgatgaagttgctagcagtaggaaccggtctgcttcccaaatggacttcggcatggacggcgaaagctcgatggatctttcaaagcaggccacagatgggatccacaaagaggtctcggaagaggacccagaagagttcacagaagaggctatggaagtccgcatgaaacaagtcaccggagaaatactgaaagacctcgaatccacgccctcgggccttgaggaggaacaacatgctgtttctagcagaattatgaacactgagctcagcttgggtatctgggattcaattaaggagttcattgatgagcgcggccacgatcagaccagcaccgctgctctcgcttttacggatgctgtgattcaaatcgctgcacgtgctcaccaaacccaggtgcaactgatgagcaaacaacctgaaaccaagcaggcagtgactgatgccgccactaacaatactctccctattgagctgccaaatgcggagcaaagcgcatgcgaacagcccggtactcagcggttggatcacggtgcagctcgggacttgtctgaagttgacgacgagactggtctcgactagagccaagtaccagcggaggctgtgcaggatgagggaaatttaaaactaaaaaagggaaattgaggtcggagatgggatcagaaatgagattgactctatctttaagagagatagtatcttccaagtgttgccttcttttctagggcttcatggtattgggggattgtgcctttctctttttgatgtacttctttgctttttctttctttccagtgacacgcagttcgtcactgtaattgcaattatttctacattacattattcttaatgccggcatgtacgccgcactacttgctttctttgaaaagtcaaagtacctgtctatcacccgtaatatcatctcaggccaaatagttcagagtctacaaaaagcccactatcagcatcgcgtagatctatggctacaggataatttggaagtgacgtgtcataaaagcagccaggaaggcggcataaatgtcaaattgaaaagctcaggaaagacagactaaaggaaaaaagaaaccaaaaaccaaaaacaccaatcatctcgccggtaacccctctagatacgtatgctggagctgaaatctcgatatggcaaaagatgtcaacgtataaaaagctcatataacatgcaggaaagaaagtccgaagttggcgccagagctaaaagcagggaggtgaatgtggtaagatgtgaggatagatggtaaacagatatgaaaagagagagataaatggccaaaaaacaagtcaaacgcaaaagaaagtgtgttgcgttgggaaagatgttgtcccgaaaaagaaaatcatatcgtgcgtaattcatagtaacttgacaatgaccattggatatgatcttcagtttcaaatggggtgtcgtccgggaaatactagcgatcctgcgctagcagagtcgagcagcgtcttgagtctagctcgaaaaacaggtgttcccaaaacacacatcaagaggcgtttacctcacatgacaatacagctaccgccactctgggctcgtctgcgtctcccgccaggagcagagacagagcctacgccggaagcatcgttctcgtcttcgtcttcgttgtacagacgctcggcttcacgggcacggcgtcggcgtcggcgagcaccagcaccagtggcgccggcctcctcggtggctaccatgtattcggcccatttccggtccagccgggatgcagcggtaagatcgccgcgcagaacacgtttcgtgtgctcatcaacggtcatctgccagccgtagaaacatttcagctggatgatttcgttgggataggttggtgctggcgagggcgagggcgaggaggctggagtgacgaaggtacttgtcgatggggaggaggcgtctgatgtttgtgtcaccgtcaccactgttgcagcggctttgcgggaggcgcgcgggatgtatgcgttgctggagaggacttccctgacccctgcccaggtgacattggcgcagtcaaatatcataaggcgcatcccgatttgggggaggtcgtcgctgtatccgcggcggcggacgcggaagctggcttccatcagggtcagatctgagactctggtgttgtccatttcgacggatcggagtctcgggcagttcttcattacgcgaagcattcccgtgtcgctgagactctcgcagtagctgatgttcaagtgttccaactcttgggcacatggagattcagccagctgcaccagggtggcgtttgtcaaattctccaaatcctccagttccaaatgcgacagttttggcgtcgtgcgaatgacatcaatgacggattcatcggtcagctcggagcactgagaaacctgcaggccttccaaatctggaacgttatgggccaggcttttaaatccatcgtcggtcacttcagggcaattgtggaggtccaaatgacggagttttcgaggtggaacgatagggcgatcggttagaatatccatctctgggttctcgccatggatcagcatcttgaggctttgatcggttaggtcggtacgactcatgatcaagcgatccaaagtattgcgctcgaataaagccaaagtgaatttctcatccttgaacccgcgaatttcgctggcccgaagatctctcaaccgccaacaggactggacaatccgaataagaccggaggtatcaatatttctacaccaggaaacattcaacgttgcaagctgcggacaagaccgtgcaatgagcttcatggccgagtttgtaacattcgacagacccgagagattaatatattccaagcggggattacgaagaaggaaagtgtagatggattccttttcgatgcgacaaccctcaagcgagagattgacaacattccggcatagatccgaaatacgatctccgtccgaggaccatttctcacgcatctgaacgcagcctctgagattgaggtctcgaacaaacggaccaccacaggtgataagcttaagcaaaacatcacccgggatcttagagtagtactcggtcgtatcaaccttggaccataattgtccgttgtagcacatctcattccacgccttggatacaggggcacagcatacaatttcctgcggggtgaggtattggaagatcttcaccttaagctcctgtggcatatcgccccaaaagtcaaaagatctggccggctgggactctggaaggatgacctcagtctccaccttcacatccaccggcgtcgcgctgcgtggcgacccacgcgacgctggcctcatatcggagggcataggcacggtgcgaggtacagggaaaccagggccatcggtctccatcaaacggatgcgggcgtttgcgccctgggactcaccgggagaaccagaacagccgggagtagcagatcggggattgaggccgccatagagctgggaggaacttccattgcctagacagggcgagtaggaggtcgacgatagcgaaacacaagagagggaagccttattgtctcggcggtagccagtggttgacgaggagcgtccgcgtctggtcagcgtcgggctggacgacatgcgttggagactctgcagtaacttctgacgacccttgagtttcggaggctgctctaatgggatctggccggtcgaattggtcggaatgttcggagatacactccccggcgagggtagtgccccgtcggatacttgggaggacattttgccaacttgatcccggctgtagcacctgtgatctggcccacgaatatcttgtcgcgtcttccggggggcgtcggcacggtacggaggatcacacgagcgaggatagtaacggagggacggtggaaacgatagagcgacgggcgcgcagtcaccgggctcttaaatgggcatagtgttcgatctcaaggatgaccggtcttttggatattagcgatctgaaggtcagagagacatagagaggaagtgatcagaatgtcggtggggaaaaatcacattgaccgttattgtttgttgtagggccacggcgaaggaaccgtggaacaggtttcggcaaagataccgtacagaaaaccgagagaaccgaaagagccgagtagaagatacaaagggcgggggaagttgcgaaaggaggagagaaagagaggtgcaaagaggaacaagaaatggcggaatgcagagcggagggaatgcgatacctctgctaaacctggcactggccttttctcacatagcccgacgttgtactgcgcaagtacctcgcccctctacgttatctgcttatcgcttctcgtctgttagtactaggcaccggtatatacaggcatgtgcttgaaccatttcttaatattctatatcccggtgactttggagtatatcctagagtatatcctactttcatttctacgctacagaatgtcttgacacagatcgtctaatgtgaaaccaagtgcacacctcggctgacgacgccttgaacagaagatacaccgaattcgacgccacccaagcgggaatccactcgaggcaccgatccagggacaccccgaaggcgaagtcgttcctgaatcctgcgaggcaacccgttaaattcattttcgcctctttcggactattttcgctggtggggcgcgtgcggggaagacgactaacccgtggtacgatggcagggaacccatggaatcaaacatgccatatgtatgtcttccgaggttcgacttcgtattttacggtaagtttcctgtttgtctcgtttgagggttttgttttggaagtcaaggcaccaagtgtcagtgtagcaacatattcccgaggtccttagctcaaattgctggtatcaactccttaaggttgcatatgaagtggagaggtgatagtcatagcctaggctatcgtagactatttgccagaaagagacgtacgctaaatgttccccgcaatctaatcaaagccgtactccgtacgttgtatgtaagtctgccctcttaggtctctaggtcacataaagagatatgcaaaaggtatcgcaaattcaaatgccatgaaaagggggtgaaaaaagctcgataaaaataaaccccgataaaagaagtaagacaaatcatgcgttgatgttcatcatcatcatcaacgtggtcctagggaagttagaagaacagacactcgctccacaccggccccgaaatgatacccagtttcccggaaaatttggcatccatcatcaaaacgtaactttgtggggtatcgcgttatttgtgtttttttgtcaataagtaaaaggcggagggagaagggagagtagagtcgtatgagaagggattcaagtcaccaccatccaaggatgttcaagcacttcggtaatggtgagtcggttgtcaacgtcacgatcgagcatcgtgcggatgaggtcaatgcagtcttctgagaaaggaaggaaaggaattcggagggggtggtcaaggatctcatcgacgttgtagaacgggttctctttgtagacgatggtgtaaaggagaatccctagagcccagatgtcctgttccttgcctcgatacgaccggccctgtaagacctcgggcgcggcataatctaacaaacatagtcagcactgaatcctccccggtcaaagagaaggaaacttaccaatggttcccacaaagacatcaaatggcccgtttttgatatacgccgcactcccaaagtcgatcaacttgatccgtccctctccatcgagaatcacattctcatccttgatgtcacgatgtaccaccagggctttggtgtggagatgattaatggcgctcgcaacctgtcggaagatgttctggcactccagctcgtccatgttggccttgagctcgatataatcgaacagatccattcccggaagcccgtgaggagtcatttcaatgtaataattgatatcgtcctcgaagaagccttccatctccacaatgttagggtgcctgagcccatcccgccgtaggaagtccagaacatggatctccaatggcacagtcccgagtcgccgatcccgagtccacgtatccaccaggatccgcttcttcgtgacgaatttcaacaccatcttcttgctaggctgcttctttaaacgggccagtttgacttggccgtaggctccttgtcccatctcctcgagaatcacgtagtcgttgatcgttcgtttcgccggagggtcgttcttcgcattggcagccgagaccggaggaacgggctgcgggggacgggtggtcagaggctcagaggcagcctcactgagttgttgactaagtgctgacgtcggagcttcaatctccacagaaatcttggggttttccgtctgggcagcaacaccggcgtctaaagggcgatctgaatcagggtcatgtgtgggtgaggtaggcttagaacttggggcagatgatggcgacaggccagcagcgggtccagcagcgtggagctgtctcgagtaggttatccacaaagcatagaccaactctgtgactgcaacggtatcatcactctcatcagagtcactggtgcgatcactgcttttgctgcttttgctgcttttctctgtcttgtcctttgagaagcaggtgccactctgaaccacgcgcagttgaatgtccacgacaatggtcgagccatcccgatgcttggcaagcaagccacttggctctgtaaacacagaggcggcatttgcttttccgtcgcggagaatagaaagtgtccgtgcacgtcggaagctgtgttccggtatgacaataccatcaactagtggtacgttgtcctcctcggtcaaaacgtctagcatctcatcgaaatcgggtacaagctgagtgatgtgaagtccttccggtctctcttgaccgaagagaaccgaagagaacacagagttggagctgatcacgttcaatgacgaggacgagagcaccatcatgcctgcgacatgaggaaagctggagacttgcatagtgtaatctccttctcccttgccgaccgcgacgggaatacaaacgccagccgcagtgcgggcggcaaagtgcctcagctccacgattttagccaatcccttctcgagggatgtctcaagagattccgatggcaaacaaggtaaaaggtcggtgatcgactggcctttttgaacgacagatgggccccagattttttcgacttcacctttggcactcacgactttccatgaatcatcacactcgatgaaggcaatattctctgttatttcttccaggacccagatcaggccaccacgcttttccataacccagacgctagcggatccccgtgacccattgcgcttctgaatcgggaccacatcaccgcacagcaagacaccgcgtgacttattggccgggtggttgttgtttcgggcgtttcttgtgctggagccatatccgtcatcagtctgcgctctccgggactgttctcgtgaagatggtttgctgaggagttgtgctgtcactccgttcccaagacctcggtacttgggattgacggcggaaatgttagctctttcgggctgaagtggcatgcgggcagcgacgtcagtgctaggatctcgaagtttagccttgagccattcctggtgttctttctgtacaacctccaggatgctgagatggcgaacttcggactgaagaacaccaaagatgagacacgacaaatcattagcggccagaatggtccatggttccttggcttcggtcctaaacacggcctgggaagccggggtccatttgctgctatgggcgtggagggcggggatctgaaatcctaatccagcagacgagggattgagcgaggcgaaaggatccgcggaagaggtgtatggttgtgctagagtttccatcagcttgctcctgatagagacagagcataggtccgtgtatgtacgttttaagcttacgcgcctggatgtaggtgcagagaccaggtccctcctttggttggagatacgatcgctgggcaccgggctcaacaattgggagctgtcagagggatgtgatcccaaaggaatggaatcctgggcgccctctcgggtgctgaccggggaggaattgccgtctgcgaaggccttctcgaagatattgtcgctattaatctctgcgggtcctgtgctgggtccacggccatggagttggttatcctgggtttcgagaatattcgctcgggccaaaaggtccatcataccttgcatctccgtgtccccactggcgtttgcttgtgcgctggcgatcgcggcattggtggcggcccatcccatccggtcgcgcatgaaatcaacagaccttttgagaatgttctgacggctgtggagaaactcctcggactgctgggcaaaggaaaaggagtgtagcgactccagtggaaaccggtgtaggtccgctagatccgtgaaacttcggctcgacaaaagattggtgtgagctcgagaagatgagcgagaacggggagagggagaggggcgctggccagtcataggtgctagtgatagcgacgaggaagacatgtttggaagggtcagtactctcgagggttgattttggcgtatacgatccagtccagatgggccaattccatggtcgctgtcgaataacggggatctgttggagtatagaaggtgtcaacgttatgttaaggagtcgaaagaatataatcggctgacctggagagaggttcgtatcccgaagaaacactgcccgccgagctcctgagttggtctgtctgtaaagaaaggttgtatccggactcggattcgggcgactcagagagaggtcctaacggcgacgaaagaggactcggctcgcctaagtcttgatcagcgtgattcactagcttatgatcaagtcaatcggcgcgtctcggagtttccattccatgggcctttcaggaaacgtgacggtttggaatgatcagacgcttcatctccacggtcagatgcatatctgagcatgtgccagcgggtgaccgtgatcggctggggaaaaagcgattcgcgccctttcctttccggtgctcgatgagtcgtaagcccaatccgagtaccacggtaacccgttcttctcgccctcacctccactagttccccaaggcccatgaaatgagaaacaaagactaaacgatcaacatgaagaaaaagcatgtgcgcgtcactgaccatcagggttgtaagccgaccccatccccgaggtctctcttctctctcttctgtctctctttttgtagtttttggttatgctcggctttaaattcagatgatcagatgggagacaaagagaaataggctcaatggaggcgagcaatcgagaatgtatcgagggtatgcgacatgtatccggtcattcgcaactgtgacggggattgggcgggcagctgcctcgtagggtctcaggcggcatatgtggcgtcgcggctgggcacgcagaaaggtaggaacaagcagaggaggtcgaggtgaatctttcaagggggaggaaaaagaaaaagagcagcggggaagagagggtggggagaggaaaatgccagatgcgagaaaaagggaaatgggccccctccgtgatgtaataactcatttttcctatgttttctatgtttctatgttgctacagccatttctccttcgaaataaaattatatagaagacaaaatgaacattttatcttgcattgacggtttgtcttatccagatcggctgatcgacatttctatcccatgtggcggaggaatttgagaatcagcccttgagatctatacaagatagaaatcatggctgatatatcttaaatagaaccaagtacaaagctaccaccctaatacgtgagtccacttccctcgctccgccaatgagatatgccatggataagttatttcccatcgaaaagactcgagatgatgcaaagtggctttcttaatagatccgagcgtcttaatgtgggactttgacccctttggttactagctttctatgaagttgaaagactgtctcacatggtagatcgaggcagagatgggattgaaaaaactagattctgccaaataaatgtctccgttaatggcgtggtctgtaacccattttctgtgcgggaattgagtgataatgcagcctggcaggagataagaagtgggactagccttgacccatatgtccacgggtacttccagtgcatacgcaagcagtgaccttggcctaatccggagatatcacggtgggccagtccctgacagagggtcccgagagccccgaaggctgtacagcgccaactcactatgctcggagtcggaccccagattgtcatctccgctcattccgaacaaggcattaggtttgggcttgcctcgagtttggtctagatgccgcgtctgctcaggcggcggcgatgtcgagctaacaaacccggacaggttccgaccaccgcccagcatccatgagaatcccgaatcggtcatagaagttcgcacagttgatcgcgagggtattgtccgcgcactctccttcttcctgtgtgtccgacttgctgtgtctaggatagaattggttccactctcggccttcggcccggtcatatccgctttgacaggatttattgttggggattgaccctcgttggccacaattttgccttcggctttgcccgttgtggatgtgattgtctcttgtaactcggttggttggctcaattcaccgtctacacgggggtcaagagggggatctactggtatcgaagagtctccaaggcagatctggacactctcaactttgaccagagcctgcttcactgcgttggtcgtatcagaatccaggtccttgatatttgccagctgcgatccaaggtcatccagcgcctctcgcagaatcgttgccaacgcctggttccttttctcaaatagattgatcttcgtttccagtctgcccaaggccgccgtagccgccatatccgaggctgatgtcgcggaaacaggcctcgaactaggacgcatattggcttcaaaatgcattgtatgcatatttttcctggcttctgtcacggcgcctcggacagctttggctacgccccaggtctctgtccgacgttggattccctgggagacgtcttggaaaagagattcgagacttttgggactgtttcgggctggtgatccagcaggtgggctgctttcactgcgtttcttaaagtcttcccaaaggaaggccttcctcgtgggccgtgtactaggctggttgggaaatttggaatcgggcggtctacctgaatatttcgatatgatgaaactgcctcgatcggcggtagggttctgttccaaatataatgcatcctgcacaaaagtctgagctgtgtgtggttggggcgaagggtagcgaagcaataatgtcaaggcagttgtatagtcggccgtaagcactaaatgatacatgtcagcgaaacaagatacgatgaggtattaaggtcgaccaacattgccaacgaattctaagtagcattgcaatgcacgtgaaatccacaagatcagaccgtagtccatgagcaaacagtaaatcccacatcatcaggacatcatcaaatggaaattctcgcccaaacagaaggcgcatccagcggcttctcagtagttagtacagaagaaagtagataggtgactgaaagctgcttacgttaggaaaatttgcggtaatatgtccacagcttcaaggtgctcggcgagctcatgatcgataatcgccaaagcttccttatggagataatgacaccgatcaacaatcggaatgacatccatctggccattggatgaccgtgtctcgccgtgctcatagtataaacgggccgtctgcattacagatagaaacaacgtaaatgaatcatgctccacgaattgtgcatcaagcatctccagcatcaaaccctcacttgtgtccttgttcgcatcaagtccttcggggtgtggcttcaccgagtctcgatctactgcccagagaataggggcgagtaattcgtgcattccttgcctataaccgacatctggattgagcttcgagtagacgaacagaatatcagtcaacttggctttcgtgtcgggctcttgaaaaaagaagttttcctgcaagcatcggtcgacatcttgtaggatctcggtacgcagcgtctcatcgtgtcggagtgtttgccaaggggactgattgttccaacaaaaaataattagatcggagagttcttcgagttgggcggagcacagcgagagggtaattatatacctgctcatcatccgccagaggatcaacagtcgactccaaatcgtctggatgttcgatgtatttcaagaaatgatctcgcagtgcacgataggcaccccgagattcgtccagcttaggcgcccattcagtcttctccaacccgtcgaagagtagaaatgcctgcacgaagaatgagcatatatctccacctcacgttgtcaaatctccagaaccttccagcaaactgatctcagtccgtcattgcacaggtttcctccttgctcggattgcaacgccgctcggaggtcggaagtcgtggtgttgtcggagaacaaaatgtcccatctctttctgtgagggtcagtaaaagtaaaaattgacagacagcgtgagagaaatacctggtctcctcaatggttctcattgctgaggatgagggagagaacaatagaaggtgagggggatgcgggcgatagtagaccgcccgtgccttatctcgcgctactgccctgactcggcccttgcgatgttccaccgctatactccggtttagttcggattgggaagtttgcatatctaaaatgatatagagtgcggctgacattggcatattcgatcctgtgtcgttctccctgcagaaacccgctgcatcgctgcacttttatgtcacctctcacagcttcatgacactagtgtacattcaagatgtccgctgatctgctagcagagtttggtcaggcgcctgctccggacaataggccggaacagcagccattgcaataccgcaaaaactcatccttcgacgacgagaacatcgatttcttcgggtcatcgggaagtgtgcagcacaacaaacgtcccaatccgactcctggagcagccagtcaacttgcaactccagcagctttgtggcagggacctggtcgtcaggaatttgacattcccttgaatccacatagtgatgtattattcgatgcagcatttgacacaccaacaagtgatgcagacgatgactggggcgaattcgaggtccctgattcagacacgctacatgcacaatccactcttgtacattcatcaacagctatatctccaaaaccagagcctcggcaagatggtccgcaagcttctaaaacaattgacttgctcgattcactctcattgcaagactttgcaccggctgtgaaacttcactcgaatattactaaaaagaagtatcctctcgaacctgataatagccaaaatcaggcgacatgggaggatgattcgtttggtgactggggtgatttcgccgatgtgcctgctagccaacctccccccaaggtcgccgagaagaaaacacgaccacctacaaaaccgcctgtcaaagccactaagccgcttgcatcaacctgggatgacgacaccttcgacgactgggatgatttttcagatggacctagtgtcaagcctgtgcctaaatccaaacccaccacccctagcccagctcctactagctctgtttctgggaccacagcccctgcagcaaccgtgcgtccaacaaacatcccaccaccatcaatccttctcgagttattcttggatgtgtttgagaatcttcagaaggatgctacactcgcaaaatcccaactgcgatcttcggccccactgtcatcctcatcttcaagcaccgtttcaacaacagccttaaatattcacaatgtacttcaatcggccgcccgcgtaattgcagggcgaagtcttcggtggaaacgtgacacaattcttagtcaaagcatgcgaatcggtcctgcccgttccggcaaagccggtggtatgaaacttaacagcgtgaacaagcaagagaacatcaaagaggaacaagacgctgttgacgtgctgactacttggcgtgaacgggcggcgattttcaatgctattctacaagcggcgggccagcggccaatccctacgatcccagatcctagtgcgctcaaggttattacggcacgggcggaccagggcgcactaaaggcatctcatccatgtgcactctgttcgcttaagagagacgagcgggtgttacgggtggatgaacaaggtgttcaagatagcttcggagagtggtggacggagcattggggccacacagcatgcaggcaattttgggagacaaatcgaaatctgcttgggcagcgttgaaagctagatatgtatatagaagaaaaagttgtacatgaatgggtagaataaagggaaatgtcaaatgactcgaatcatttggatcatcgggagggaacccgacgacatccctatctcttccctcctttcaccctctcatacttccctgctccctcgagataagattttgtatccacatccctgcgaaaccgtctgattcgtctttcgccttctgataacaacacattcccctcacggccctcatgggcctcacgggcccccgcattccggccacgctgattcctaacatatcacaatacagatggcgggtaatggaagactcgcaaaacgatcgtcgaatgcgtgagtggcattttaaattaatagaaatgcataccgctgactatttagttgtgtgcgatgccggagacagaagatcaaatgttccggggcgcagccctgcgaaaagtgtagcaggcgaaagctcacttgcgtctttgataaccatgaccagaaaatcctggtaacaagagggcaagttaaatggagtgttaagaagaatcgatatctcacatttatcgcagttacattctagacctgcagcagaagattgcgcgtatagagcagagccagaagggccaagtgagccctttcagcccgaatttcgatactcagacatttggtttgtcttactttctatttaatctatttaaatggatgcctactaacctgttgcagatcccaaagatcgcgaagatgtacctcctttgcagaggactagtcctccagaggatcttgatgaagcccaagacctggaggatctggactctgggctagctaaccctttgtcgtccggtcctcctgcatttatgtctgcagcaaatggtcgtacatgtaggttatgccggtttcttggaatgcgcgactctaacatccacagtctatcttggaacatcatccaactggtcgttcacccggcgagtcctcagcttggcacatcagcacctctatcagaatgtattacctacagaaactctgatatttgatgaaacgacctatgagctgggatgggatgggttacgaacaagcccgggcccagatgttccagttgttccgactcgcgatcacaccatgtatctgatcaacgccgttcaatttcggtgcgggcaattgtatcacctttttgaggaaggagagttcatgagttctctgcatcagtactacttgggagatgggcaatctatgacaaatagcttgtggtacatccattttctcctcatcctggcctttgggaaaggatttgttcaacccaaggctcaaggtagaaaaccaccaggggtgtgctatttcgtcaaagctttgcagcttctgcctgatccgactgctctgtaccgtgatcctatgctgggaacggaaatcctatgctgcatcgccttatactaccagtgtgttgactttcgaacttcggcacataactacgtaaggtttctaaaagaaacgtctcatttgaaaaacccagctgaccaatgctttagatcggacaagccatgcggatggctatggcacaaggaatgcacactagtatgccagtcgaggatttaggacatgacatggttcaaagatccagcaaaatctggtggactatttacattctggacagagaaatgacatcgttaatgggtctgcctcagtcgatcaatgaccgatatgtgcaaacccagctccccacctttgcagacccatcagagacaatgtcattgggcatgcacatcaaattgtccaagatcattgccgaagtgaacagcagtaagagttcctgagcttccatcgttgattatcacctctaacaaaaccaacagcaatatatgttatcaatgggcgctttaatcggacttttctacttagcacaaaaacagcattggcgaacatcgcagggcttgccgatgagcttcgcgagtcatttccgctacacttggacccaggcagcggggtttctcgaatatcagcatacttacatcttcaataccaccaggtatgtgtcttatcatctgcgggaagagctgcatccgctaggttctcacatcatatgcagtgtattatcctggccacccgacctctcctattctgctttcttaagatccgcttcgagtccccagaaagctgtttggaatccctcaatgcatcccaaaatgtccgaaacctgatgcaaatgtgtcttgaatccgcccagaacatcatcagcattctctccagtttgcagagtcaaggcctcttaggtacaacaaactttcgctacagatacgcccttgtgactaacacccaaatcctagaaaccttcctcccctttgatctagaatcagtcttcgtatccactgtcatcctcctcatgggaccagcgatcgacccgcgagtattagagagtcaccccaactggctagagaaagcctatgccatcttcggcgaaatgatcagagacggaaaccaagttgctaaatttcggcgatccgagctccagcagctacacgagacattactaggctgtatctctagtgatcggcctcgacacttagcagtccctgacttcttccagcaggctgagatcatctctgacccagcttctccttcttcaacgccgattcctggggctatggctcaatctattcgatataatgatgcgcttctgaggccggatcctggtttggatgtggagtgtgattttactacgatgctgacttcggctgaggttatggctgttgcgaactcgattgagagttatgatactgagtgggtgtctaatgcgatgatagaacatagtatatggtaaattgaatgtctgatgaatgacgaattgcaaatataaattccgtgatatttttatctgttccgaaagaaaaagcaagacggtctatgccttgaatggttaactatacgttgaactcgccgacattaaatattcaaatcatctaaagcttggacagtatcgtaggccggatctcagagaactccttcgactctcccaggcgccagctcacatcaccaccccaatcccccttgccctcattgggatcagtatgcttccatttccaccgtgcttcatgctgctgaccagcctgcaggaaatccgaaacccacgatccaaagatagggaacatcttgaacccatgcccagaatcaccagacaacacaacaaccgacgacgacgtctccggaacaaaatcaataataaagtccgagtcatcagtatctgcaaaccagcaaagcgacttcttaaccagcgggcgattcgcaagcgccggaagagtctgcgccagcaacttcctcatcttcctctcgtcatgctccggcacaaacgcactttcctccaaagtcccaggcgcatgagaaactccagtctcaggatccgtattgatatatcctccacccataggacagatcttcaacaagtttgtctgaggatcgggctcgaagaggaaacccaagtcacgagcataggtgacaggaataccacgcagcgcagaagtctcttcatcggtaagatgaacatgcgccacagaccacgatttggccacgaccttcttcccaatctccgggacaagacgacccaccgcaccgccagctgcgacaatcaccaacgaagacgggtggaacttcccatctttcgttcggatcccggaactcttcttgccttgcagcgagctgacatagacgatttcatcgactgcgccgcgctctccgaggtagaagcgtacgccggctgcctgcatagcgcggtagacacctgccagtgcgttcccggagtgtgcatacccgtcgaagcggttcaggtatccattccacccagtcaatgggccgtcgagctgccagcaggcttgacgaatgtcgtcttcgcccttgatgggcacgacatgtgatttgagttgatcgttcccttctgcggaagcgcggaatctattgagggtgtcgatagccttttggggtgcttcgccagacacgcagtggaggaatccagtctggtggaaatgaggtgcgaaaagaggagttttccatgcggcgatggctttctagttaatagataaaatgagacatcggtcagtaaccaactcggttatagcatcggaaatcgtgggcttacgattgtcaaatcggtgtagaatggatcctcgtattctgcgcgcacaatcttgttcaggtcattggcggctgaatagcgcggaggaatctgctcgtctctttcgaagacagagatattcgtaaagcccgagcgagtcaaatgaagagcgctggagagcccgaaggctccgccaccaacaatgatgatcgggtcgcacttggagatacccattgtgaaatttgatgaggaacttctaacagatggcctaatagttcgatatctatagctccaggccaatacaccttcatgagtcgacggcgtcaatgccgactctccgggagtagtgcggggagcgcggagaaatggaccatcgggaggccttccgatgtgcccaaatggggttttggatgtttttgataagaaaatgcaagccacgtaagaggtcagatgtggaaatgataattagaataacgtatgatatggtgagggagtacatttagtcagagtcactttattggtacaagcaaagtatacgaaacatagtagcataacagaaatggataaatcagattattgaagtcctacgacgttaaggacagaggctggctcctattgtgtcttatactaatcttaaaagaggaactgatgaaaataaatgaaagtatgcttagattgcgaaagtgcatatatgttaacaaaaaacctataaactattcattttatatctcaactttagtggttgctagggtacataaacccctcatcctgatcaaagaattcctccttaatcaaccgtgggctaacaaaacgacgcagagtatcagagctaccagccttgtcgttagttccgctagcacgcgcaccaccgaaagactgttgtccgataagggcagcggttgtcttgcaatctgtaagaggtagacgattagatatagcaacaattcacgttggtactgtgcgacttactgatatagaagttgccggcagagtatcggagcttatcttcagcctggcggatagcaccacggtccttagcaaagacagcaccagtcaaagcaaatccgcctccattctgatcaacagacttcaaaatagaagcccattcggcatccttgtaaacatacagggtaagcaccgggccgaagatctcctcgttgaagagacggtggtctggtgaatcggcttggtacacggtagggtgcacgtagtatccaacagattcatcataagtaccaccagcaataagcttcagcgaggggtccttgttgctagcatcaatgacggacttgatcttctcgaatgatgcacggtggatcacggggcccatgaaagcctccaaatccttgtccgggtttccaatggtaatctccttgataccagccttcaacttagtaaggaactcctccgcgcgagactcaggcaagtagagacgagatgtggcggagcatttctgaccctgatactcgaatgagccgcgaatggtgtggttgactgcactggtgatatcggccgacgggtgaacaaggtggaagttctttccgctggtctcggcaacgaagcgagggaactcgcggtatctcttcgcagcaacaccttgtccaatcttgccatacagagagcggaagacatcggaagaaccaatgaaattcaggccggcgaagtcgcggtgtgcgagcacagtctcagtaatggcttcagggtcaccggtcacgaattggatcacattgggagggagaccagcctccaaaagaatcttgtagagcaaagagctggcgtagacattagatgccgaaggcttccatagtaccacattacccatcagcgcgggcccgcaaatcagattgccgccaatggctgtgaaattgaacggggggacagcgtaaacgaagccctctagaggacggtagtcgatacggctgtgactagttagcaaatgatctgcgacaactcaaaccagtcatactaacctccacatgccatcagtgccacgagttggctgcttctccaagatttcagctgcccagttgcagttcaggcggaagaaatccgccaattcagccgcggcatcaatctctccctgccaaatgttcttcccttgtccgagcatcgtagctgcaataatctcgtatcggtacttggtgcatagcaactccgcagccttgaggaagattgaagctcgatcaacaaatggggtatcctgccagctttgctttgcctccagagctagttcaatagctgaccgggtctgctcatcggtggcaagtgggtagtttgtaaaggtgacggcatgttcggcaggcaatggttgatcccaagacttggagcttgcctggaattttccatcatagaagagctcactccgcacgggcagctgagagcggagcttcgtcagtgctttttcaagcttggcgcgctccggggagccttttttgtatgaaggctatagtgtgattagcattgaggtgggttaagtagttgtcgcactcacgtttggttcgtttcgagcatcggggagacggaatggcatagtagtcttagcccgagtctgaacagagagtcctgcaggaacagagcgcaggcgagagccaataggccgtgccgagcggagtctcatgagtgtagtagacatgatggatcgcaaggttgagtttagtgaatgacaatgtaaactcaagaaatcagtttgagacaacagactagtttaaacgtcaacgacccctcttagaaatgtcggaggcttccccgtttaccccacagaactattgcagtgagcttgagctccggacaagataaagctaaattcatagctgctgttcgaaatctgcagcatcgggatgccatccggtgatcgtatcaggcttgattgggtattgtaatcatatatttcaagtagataagcatgagaaatcatgactatgtgattcaaattatcattatgcaacaagaagctcaatcaaatgaagctcgctggggcaatcctttgctaggacagctagcaggcgatctcgccgcggcagcagcctcggcgtccttagtgacacccgcggtcgcaattatcgataggttcgtctggatgtttccaagcgcgatgatttcgcgctaatacataccctcagagcgcttgtcgagcaagctgccttcaaacaacccattctccgcggacttcatcggcatgcgctcgcggccctccgacggccgggtctgtttgttttccaacggccattcggtattgtctgggccctctatgcggcaacctattccgtcgcaaatgtgaccgacacaatcagtcacaagcttgagataaccgccgcggggacgatcacatttgccacgacgatgatggccaatgtgccgctagcgctgtggaaggacatccgatttgcgcaggaatacggaaccggcaggggtcccgatgccaagacattgacaacaaacactccaatctctgtactccagaacaaatctttggcacgaactgcagctgctatcttcctcgcacgagacggtgtgactatctttgggtcatttactttggccccgtggttgtcggatgccatccccgaccgcttgatgactcatcccaacgcaaagccgatcatcacccaattgaccgtgcccgtcttaactcagctggttgctactccgttacatttattggcattggatatgtacacacggcaatatactatgcccttcctaaaaagggtaaagcactcgcagcgatatctgccctcgtcaactttgttgcgttgtgtccgtatcattcctgcgtttggaattgggtgcttgacgaatatagagttgcgatctgctcttcatgccaaagtctcgggttgaattaattatttatctcattatcagtccatgtcctacatgaatggctggggcattctacctgtgtggcgttcagtccacctttctcgatatcactgacgtgcgccagaatctccgtctggtagggcgtctctcgtgcaatttgcacagtatcgaagacagacttcgactgaacaaaaatatcatcgatctcctcgagtgtacggcccttagtctcaggacagaacaagtagaagaacacacaagcaaaggcgctaatacatgcgtagacaatgtaataccgccagtggatagtagcgaacccgactgggctcacctctgccaatacgaagttgaagagccagtttgctgcagctgccatagcagtaacttgagcacgagtttttagcggtgcgatctctgcggcgtacatgaatgggacaaggaaaagtccaatggggaagcagaaaagcgctacgaagtagaacaagagtgaggcgccagccatggatgtgtttttaagatcactcgatagcccagccaaacaggcctgggcaatggtcataccggcagccgcagcaatgagcaatggacgacgtccgacgcgatcgatgagtagaacggccacgcctgtagccaaaaattgccagatttgcagacacccagtgataattcccgagagtgtacctgagtatcccagatcgcactggaagataatatcagaataaaaagtgatgatgttgacgccggtcatctgcgctagaatatttacaccaacagcaataactgtacggtgcaggtggcggttcttcgtgagcgcgaatggcgacgaggaacctgctggttcggcgttctcgtcaatttcaagtgactgtcggataatttccagctcctgtaagacatgctcagagtcgacagccacattttccatgcgagctagaacttcagatgcctcctcgagacgtccgacacgtgcgagccaccgaggagactcgggtagcagcatgatacaccccacaacaatgagaccaaagaggccttgagaggcgatgggcaaacgccagctgaccgagctatcactaacataggagagtccgaatcccaaccatgctgcgaaaacaacgccgccaattgcaaaccatccctccagtagcaccattcgtccacgttcctctgctccagatgactcggagacgtacattgggattgtagcggtaaagccaccgacaccaagacctgttcagttactggttaacttattgcaatctgttcaatgataaggggctttaccagtaatgactctgccagcaataagttgaccgagtgagaaagaacttgcttggatagctataccaacgaaagctatgcaaccggcaagaaagatggtcttgcgacgaccgagtctgtcacctaaaaaggcgcaggaacctgcccctattgcgcatccaacttcatagatagcgaccgttgtaccttttaatgatcaacattgctctcttgaacatctgccagctgattcatccgagtagataccttgaattttagagttgtgagatttctcacgaccagtagtttgaacggtatcgacttgagggaatacggcgatgaaagagtctagtatcaacaggccattggcaattgcctgatcgtagccctgcagtatgaatccgacagccccaataagactgatggcgaggctcaatgacttgcctttgagcttaggggccatagcgtccactctacctaaagtctcttgtcggatgagttccaaatcttcagctcgcgattccaacacaggggagaacaccagaaataaaaaatacggtactcgatacagcaccccacttagtagatcctgaagcggagggtcccagactaaaggagacggactacctgggacttctagaagaaagacaaatctgccaagcttcggatgttcaccgaatgggccaaccagcttcgcgcatttgacggtaagtggatctcgagtttcttcaagtttggtgaagtacagcgctaataagtggctggccaatcaagttccggattatcagcatccgtggccccggccgcccgtagtttctccgcattctcatccatatattattgcctatagtcaatatttcatgttgatctttcctcgttccctactaatacctcaaatccacttctccctagttcgtaggctgcatgtcataatttaggacctttgtgtccagacgagagggctgtgagcctgaaactttaggtagcagtgagctcctagcacttgtcatgttcatcctccatcacatgacttttggcgcgatctgcacgattgcccatcacgtgactatatagatcgttgacaccttcgttccttcctctttggtatttggctctttcctttgttttttcctttttagggctgtctacaaccttatttaagcgagacattcgagttttgcaccgtttgcaggaaagccaggtatataaacaggctgattcccacttttgaacttacttcttctttctctcttcatcattttgaatcaaccacatcacagagcaacccctccgacatgttatcgtgtccataatccatcacatgacttgtctgctcttactgtctctttttcatctacttgcattcatccttcatgcaaccaccacatcacaggcatcccttcatggcacctgtcatgttcatcatccatcaatggcttgtatgttcttgctgtctctttttttctcatatacttacattcatcattcagacatcccaaccacattctccttccacattcaatcttccacttcatgaagtttgtttcttcttgtctgtgttgtgacctattcttcatcttccctcatcatattctatgacttggtaaacacctgatgacatgaggctgactgtactagatatgtatgctcaaccacatctgctcaaccatatccagccttgccgagacagattccgccttcaggactggcagcatgcttgcaacaacagcaaacacaaaaacagaaacagaagagaaaccccccccccccccccccccccccacgcaccaccactactgcgatgcttcgaccttaaaagaggaggaatgaaaagaaacggtcttgaacgacagagtctccgcaggagtgtctctgaaggagacttctcgtcgggaagaggttacagcgtgtacccatttaaaggagactctcaagaccgtttgctgtggtggtataaaaaaatggtcgcctcgacaagcatgcatcgacatccaagaaccacatccaagaaccacttcaatccatccacttcaatccatccacttcatccatccacttcatccatccacttcatccatccacttcaatcaaccatcgacattcggcattcgactactgcgatgcttcgaccttaaaagaggaggaatgaaaagaaacggtcttgaacgacagagtctccgcaggagtgtctctgaaggagacttctcgtcgggaagaggttacagcgtgtacccatttaaaggagactctcaagaccgtttgctatggtggtaaaaaaaaaaaggtcccctcgacaagcaagtatcgatatccaagcatcgacatccaagaaccacatccacattctactcattcacttcaatcatccaccaatcacccacttcaatccactttaatcaaccttcaatacacaatccacaatcaacaaaattcagattcaatcacccatgatgcttcgaccttaaagaggaggaatgaaaagaaacggtcttgaacgacagagtctccgcaggagtgtctctgaaggagacttctcgtcgggaagaggttacagcgtgtacccatttaaaggagactctcaaggccgtttgctgtggtggtaaaagaaaatggtcacctcgacaagcaagcatcaatattcaagcatcgacatccaagctcaaccgcattcaacaaccatatccaagctacacttcaatcaatcttcactcaactatccatattcaagcatctactccaagcaatcatatcaagcaaccccttcaaggcaaccacttcaaggcaactacttcaatcaagtttctacatccaagcatctatatcaagcatccacgtcaaccatccactcaatcaaccatccactcaatcaaccatccactcaatcaaccatccactcaatcaaccatccactcaatcaaccatccactcaatcaaccatccactcaatcaaccatccactcaatcaaccatccactcaatcaaccatccactcaatcaaccatccactcaatcaaccatccactcaatcaaccatccactcaatcaaccatccacttcaagcatcgacattcaaacaaccatatccaatttccacttcagtcaccatctatattcgactactaccatgcttcaacctttaacagcaggaattaaaagaaatggtctcaaactacagagtctccgcaggctctaaaagagacttctcgtcgggaagaagttacatcgtgtacccaatcaaaggagactctcaagaccgtctactgttcaggtaaaaaaacactatcgcatcgacattcgaactttcacattcaagcttccacttcgagcttccacttcgagcttccacttcgagcttccacttcgagcttccacttcgagcttcctcttcgagcttccacattactcaactatccatttgaccacccacaatgcgcttccttttaagaggaggaatagatagactcaaacaacaagtgtctctgcagcagattctgtctgtcatatactacatctcgttacaaacccttgctccattcgtaacattccttgtagcatacatacatagtcgtttctatagaggcataaaccacagctaaaaattaaactcaggtaaatcagtaaattaattaattgaaagcaaatcaatgcaaaatcttacgttaagcctcattcacatagtggtcaggtgaccacccggacaccctcagatctagatacgaatagtaactccctcttcgcacccattaacactttgtactttatacgcaaaccccacgattttaccccagaaaaccacacacaatcgtggccttcccgcctgacttatacatatcgcttaaatgatgtttggtggtttagcgctcgtgcctgagctctctgacagcatgcagatctttacctaaccttcctctctatacactatacaggcctaatttagagaaactcgaggtataagccagtgcaatacattgatcataaactcatatactaccggatacgctatgaagatggcgaaagagaaaacgtcaacttggctctgcggaaaacctccgccttcaacgcccgatactcattatctgtccgcagaacagcatcacgattctcgattgctcgacgcagaagataggccagacattcacccatatctccccaagtcgagcatttgtaaacctccggtgtcccatcgccgtcattcatctggagcagcgtgaagctaacttcatccgacataccatggagttgggcgaagcgcacaggcacggtgggcaagcccgacgtgacacgatgcttatagagtttctgggcagcgaccacactctccttgttatgacttgccaggaagagatttaccgaggggaattcgcggctgcccttgtctccaaattctccaatgttctttctcagcgccccctgagcaatcatattataagcgttgtcggtgtcttctttcgtgtcgtggatcagggaccgttcatcggtggccatgtatgcgcccctcacgagcttgaggccgagagtgaatccatcttcgcttgccacagttagatggttggccagtgtcgctggtgtgcttttgaggtaggcctggtaggtactgtagatagttgcataaccgtcgcggttgtatttgcgcataagttcaacagcgacctgtgcaatgcccttttggaaatgctgagactcggcatcgacgaggatgcgaacttttcggtctttggccttggtgcagatctcatccagtgcgtccatcatttgctgcggaggcaaatctccagcggcgaaggcctcggtggctttgatgccagcacctgtcaatcttgtaaatggtcagtcggtaccccatgaatgggtggtgtgagagtaacttacttgactgcgaggtaatcttctgcatctgacatgtcgatggtctcgactgttcccttccgccaagcttcgatgctgggacattgggagaccggagcattaatcgacacgttcccatcctcgcttttcaaagcagcaacgccctgtccgtgctgagcctgagtactatgatcaaacacagtctcagcagcgtaagtcaaaatcacaccgcggaagcccatatctttcatttcccggatggtagatccgcattccgccgcattctctccggcgcagaattggttgtagaacgttttctttaaaattccatgcaggatcggattccgatccacatcaaagagccagatcctgttaggtttggagaggaaggacataaaggaaagcgcgggtatgaggaggaatctcttcgacgatatcgtagagaccagcagagatctgagcaagacatgcgcgggtaagatagagagaggtggtaatgaggggcttggatcagtcttgacttgtgcctgtgcttgcaatgttgaactaaagcgcagtctcgtggaggcaggcacgttgctcgttcgaatgcatcgcgcaagaccggttacaggctttccgggaaataaggtacgcatctctgttatgatgttatgaatttcaactgctcattccaaattagacgaagggaccagcttctttatccttcaacattattccccgcgtatagtaccagatagtatatcggacaggcctccggtgcttttgatagctgaaacccaccatgcggggtggttatcgctggtgctggtcagtctctccacaagcagtaatggaacccgcaaagcgtattcggaagaccgttttcattggtggtccagatcattccttcgtggaatgtctgtacggaagactcgccggtggcggggttgcttgtccatgttatcaacggtatgcctaccgacagtacctatttttatcaagtgacacaaagatagactggattgaagtaatcgttgtcaagttactaacggctcatttcatgtagttgtacggaatattgatatcttatacaactcatgttttccgatgtagatttgctatataggctaagggcgaagagagaatactaaccacagctacaatgatgcacttatcggaggaaaatatcattcattcctagatataagtatgtaacccttagtccattcttccttatccgctagcttccaatttccatttccagtctaacaaatgagagcagcctacgcatggcgcacgagacagaacatcagaccactttttattatctcttttctataaaacccactcgttgccagcattagaaatcctcctcgaagaagcctacaacaacccggtatacctccgactctccctcgagctcgccgagccaggctcaacaatgccgttcatggttctcagcgcgcagtaggtattcttcggcggattctccctcgcatatctcatcccgcctcagatctgttatcgcttcgtgggatatatagaaggagaaggagctgtgatcacagactgacaggcaatccatgacctcgagaatggtcatatgcctgaatgggagagctggctcccgagatggcaactgagtactggcagatgccgggctaacgctgtatacattcattgctgatgtatatgtatggtgaagaagcgaaatattgtgatttcaatcatactttagtgaatttagatcagaatcaagatccgaatccttttgcggcggaagttagggttctggttcaattttcttgctcgtccagggagctgtagggaaataggtgcttgattgaggaatcagtatctattctctttagtaaatcttcatcactctaccattgagtgtgtttgtttatggaaaagaaatcactagagctctatctaccatggaagtggatgttgaacatgccgataactacgtgagtcgctagatataactaataagtaaagcttttgttatctacacaggtgtaaaccaagcccaaatttgagaatcgtgccagataccaagttctgcatgtggaaaaaggcgatgttggacgaaggcgggtgagatgccgaggctcgtcgggaggtggtcccgactgaggcctagacatacaactggtcagcgacgactgtatagagttctgactgataattgcaacccatttcggtctgtttaactggcttctggtcaagttaggaggcatttattatgtagcggtgtgggtttgatttgagtctaaccgaatatgcaatttcgctagccgatcaagggcgactatcaaagaaacttgagattctacgcattttaaacatactaggagatacggtgctagacatgtagaagagaaatccgaatgatgcccaagtaataccatttttgggataaaagagtagagatattgtaagtacatgcaggagaatgccacaccagaaatgagaggcctgataaccaaagcatgtagatatacatagctatgagtttgagggggccgaggaaaaatgccgtgggtctggacgcgtctgcgttgtgagctggaaccgaattaggcgacaatgaagtggcctctctagagattccacgtgcctttggccaagcatatctttcaattgagtctgcaaatttgggatctgcgggtccacgcatgctacgggtgcattaagggctccgatgcgcggaccggtcagagaaatccggttcacttctgcgccaagcgtcattttgggcatccataccgggggggttgggtccggagttggtgcgagagcggtggtggcagagcgttttcagtgatcagccattatcaaacaagggataggctaccacgctgctagtttggtgaaagtcgtgtgcattgccggtcaatgactgtcgtaatcgaggccatgacaggaatgacacatcgcaggagatgatatcaatttcgaatgtaaaacaatcggtgcctaataactttgcgccgataccgccgcgggctggaataggttagcgattcgttcaataaggtacgggatgcaccagcgattccatgggcgataatccaaagaggggttccttacagggctgttcaacatgctgttgcgcttgtttcggcccttcttgatgtggtttttcagggcggttgagtccaagggcttgagaagttcgaagctgcaaagaagttcgccagagactgacatgatagcgccccaattatcgaattcgccgcaatactgtgaaaagtcaataagagtcatagtaaaacacgagagaagagaacctacgttgggagcagaaaacacagtcaccagaatacgatcctggtagaactcatatccgtcctccaccaccatgtgggcacggcagaccaggtcgaagtcgtgacgctgcaaaaagtccatgatcaccttctttccgaagcagtagctgacgccacgctcattaggttcccaatcttcctccatatctgccgggtcactccacacaaggtcgttcaacagaccatagtccggcacgtcggtagggcgagcgatgccgcgaatgtcgtccatgtgcgaaagactaggagagagaccaccatgaacacagaagatttttccggccacaatcgcagcaatcggaagacaattaaacgtatcgatgaaggtcttccagaccttgatgttgcagcgacgcttgcactcatcatagaacccatacacacgggtaacgttggcacactcatggtttccgcgaagcaggaagaagttctcggggtatttgagcttatagcacatcagcagaaggatcgtctccagactctgcttgcctcggtcgacgtagtcgcccaggaaaaggtagttagcagcgggagggaatccacacatctcgaaaagtcgaataaggtcggtatattggccgtgaacgtcgccgacaatcttcacgggagcagacagttccaacagagcaggctgcgacaggaagagctcgcgagcggcggtacagatggcggtaatctccgcattcttcaggcagactgttttggtaaccttgctagaataaccggcgtccaggagtcgcgaaatcatgtcgtccaaatcaatggatttcaaagcacccatacccattccgggagatccagaagtctccagaggagcgttcaagatgaagtccaaaatgggattcagctggttctctcgcttcatcagaattgattcaccagcaaccgcggaggacccggttggggggccaccagtgggagggttatctgacacaaggtcgacctcgccgctctgcttcatcacatttacatccttgtgacctcgttgcagactggtggaaagcgagggagacggtgggggttggggggtgccgggtcgcgacgcgtcctcggaacccggcgaggggaggccggcattagagccagggcggcttccgacggacttgagggagcccgcatcggatttatcggtctggctctcagtacgggagagagcagtggtggagccccgagggctatcggagctgcgggccccggggattttggatcggatcgagccgcggaacgagcggagagactctttggtgtcggacttggaaaaggaagggtaggactgcagagtgtcgcccgaggcgttgcccttggaatgcgactgacccatcactacaaggcttaactgccaagcttgagtttgcgatggccgcaggaacgatggaagtccgaactgttatgccaagaaacccctgttgtgttgctggaatgtcttggcccgagcttctgcaatgatacaaaaagcttggagcgactctgcaagtgtacagcgggttgtgtgcggactgtttatcactaatccaactctgatcggaactctgatcggaactctgaggaacgctgaggaacacgcggaaggcaagtgcgagacgtgaacacagttacaagacgaatgaaacggacgagatggcgatgtcaaactgcagatccaggtagcggaccagagctttgatcactgatgcaggtcgatcggttttcggaatggtgacaagctaaaagataaaggcggaaggaggctgaggaagctctaccgaaagttagtctcttgcacgagacaatgcaggtgcgggattgcagggctgactccgcagaaacccagatggcatgtggaggtattagtgagatggaaaagaagagaaaaggcaagggaggtccttgaaaggagcagaactaggaatggtaggttcgcgggtagaggaatgcgtcattatgtacgggggggttgaaagggtggtcgtccacgtaataggccacagacacacccggggatataatttacctccaagagaatccaatgggatgagatgtcacagaacagggcagaagctccctgccagagtgaaaacaagaaaagtaagagggggaggaaagttgcaagtcaagaaagtcaagggaaagtcgtagagaggtagggaaaaagtactccgccaccgctagcacagcgaaaaggtactttccgggtacaacgttggctgtttctgtggtttccgtttcttgggccggtctcgatcgggctggggggattaggtcagccggagtatctgccgggccgggatatataaagaactcggacagctgcctgattgaggaagcgagtcggagagagtctggactgggagagtcggcgctctgatatatatactgaagatctatggattcgggggtagtcaatgatcagctttaatcaaaaggttatttatccttttgggttattaaactaaaactagtgtctggagcccccaaggtctgtacggagtatgttgtatatctatccctttaccgcttcacaccgcacaaatggaaatatcttctttgtcttgtttcttcgatcttgtgacccctgactctgaatatctttttaatgtatcatagtctaggtcaatattcttgtgttttttggctgtcgttatgtctttgggatcacccacttattagcgctcgataagcgacaattctcctacaacgtacatgcatttacatttgcatttgggccactgaaaatagccgtcacagatgcattggtagagccactcaaacaccaagaatctttttccgaatctacccggccactcgcaagagaatgtatccggagcttggaccccaccaccctagggcgagtcttcctatcagaagtgatggagataaaaagtggaacacccactgactcaaggactcaaacaccgttcaaaaacaaaatgatacatcacaaaatattatacgttgctgcgtggtagggcataagctccctgcaaatacttccaacagtggaaggcggctagagaacaacagacaacaccctgtctcatgatcagattgcagcggaagcacacacgagccacatatactcttggttctgcaggaaaacaaccacgctgtatgccaagggatctatctctgtggcgaagacaccgctatttcgcccctccattaccccttgttcactgaaagcgcctaccacaaacaatctccctatccgataacttcaatgtcgactgcagattgcctgtcaagccaccttgaatgcagctgctgtgatcccggtgccacgttggcggagaagcagcgagcgccgctgcaagaaatcctcttggcagccccacgtccaagtctagtcctggcggaaagcagggaccggggtgattgtgggcgcagggcagaaaccgggcctttcctgcggcatatcgcgtgggatgcaatagatggttgtcatgctgcttgatagtggggcagtagagctaggtttatcattcgagaataggatagagaacgatccccagatgggaaaacaaaggtctcgtggatacgagcccgggtcggaacgaaaattaacgcttactccagctctattttcgtaatgtgtcgtcctgggatcacaatgaggcctatcaaccggtgtgtcatgtccaatttgaaagtcgcgctctttgcttccggcccttcttctagctctttctcgtgtgcagcggcttgtacggcagatgtggagggcatacgatattcaaaagaattggcgagaatgatgtttcggtcctgtcaagcagttttcgattagtgccattcgcggtgtgctatttcaaaccctatagcacgtaggttcatacgtgactgcttactgcatccgtacacttgaaaagcccaagaaacatccggttatccgtggtatggatccgcagtgtgcgacccaacagcccctccaagtatttaacagactgatcgtgatccattgtggttggtgcgtggttcgtgtcagcagcccaaggacctccaatgtgcgggggagttgaagtctgagggtagagctgaaaaggactccgatgcaggaggaaggacagtgtcgaattattcggggggttggcaaagttaagtaattgctcttgcagtttgggattcccctggcctggttcaattgaagaggggacgacgtcgggtggacgagatcactcgggtggacaaacaacgttgttggtgcctaaggccatttaggctaattggccatcacgctagaatctacaatgttcaaaaagctacggagtatagtgtttaaataatgaaaagtcagtatacttgaaagtagcagctactagttttattctatacgtatgtaacgttgcattaagccagatatttggcgatgtatgttcattaaaagtcaaagccgtcttcaaactatccccaggcttccactgctaaagaaaaaaagtctctcgagaaaggatgaaaaacaatagattgtaagtagccaataacaccgtgccaaaataacccaataggtatcacaaaatagatagaaaggtaatgataacctctcctgatttaaacaccagcgcgcaatgttgaaaaaggacccgtgaatggaattacatccaggtcattccttctagccagttcttgggcgcttgacccaatccatcactagcgcttcagtccatatccatgtccacatcaacactctcctgattggatccaggactattgctctcgctcgggctgtctcccgagattatttgattaaacgcctggcgacgcaggagatcttcatgggcctgcgcagtctcattggcacgaggtgcaagtgcttgacgggatggtcggaaagccgatgatggctgaggttttggttggaagaatcggtgtaatgtttgctgtcgggggtcaaggacttctggtgtttcgggggttggctctaagtccattgtatccatatcggtagcctgtgtagactcctgctgcttttgggcggagaagatccatcgtagtgtgttttctgccagctgtcagcgattgaacgttgacgcgatcaagggagagtactcgggggcatttacgataaatcacttggtcactaggacgatcgtctctgaagcgttttcgcgttcgactgtggagatgtgggctcccatcgatcaccatgccccattcactaggggctggagctgacggactggtcgggagagctatgaaggaggctttccgcttgagggacattttcggagcttggtgtatatagtaaggtggaccggtaggggtttgtagaggtaattgcatatataaagtcttacagaggaggtaatgaaagagaagagaagaggaattgagacgaggactggacgcaaacacaactagctgagcgcgtcattcgcgggattcgcgttgcattctgtcgggctaagccaaaacgggtaatataggtagcaggttggatgctcataacaacattgacaacattggcaacacgctttgatatttgtaaagaaacagactatttttactcttaatagatatcgccaacctagagtatcaatgccattacttcatcatgctatgcgtagtcgcaatcattctttcggtctccaggactacaagcataacatatgtatcccaggatatacaatgaacttttgataacactttcttttaaaagttttttctattcagctattcgacccgtaacttggtttgccagtgcatatcttggtataggtacatatctaaatgatactcaaatataaattcatatgagttgactaaaatgaccaataccgcctataaaatacatgttcactacaaatcttctctatatctgccaatataaaatccaataccgatatcctccaatatcccgacgtcttccaatgacgcgctggctgttccgtgggatcccccgctccccccacttcttcaattgaagagtagagcaccacttcacatttgaccttgaccttgacctattaacacaaatcataccatgccatctcgacacgcctctcactctggatcatggtactcagatagtgcccgcaccctagcccgtcagctggatggctggctggcgcaggtgccagacacgatggagaaggtcggctcactgccaaccccaggagccagagtgatcatcgcaccgtatgtctggacctttatcatacatatggtattatgcagaacaaacatactaatcaaccaggcatgcgggctattcatactcggggccctgcgcagcctacgcatacaaggcgctggatctctccaaagcgtgagcttatctcccgcttcttctatgaaagtctctaacctcacaataggaagcgaatctttatcctgggaccgtcacaccatgtttcgctcgcaacactggctctcccgacgctaacttcctaccgtacccctctatccgatgaacccctcccactagacaccgagctgattacccagcttctcgaaacccaggcaaccagaccaaatggggcgaagattagcttcacaaccatgtcgcgctcggtcgatgaagacgagcacagcatcgagatgcatctgccctacatccaccgcttgctccagctccaatatccagattctccagcctcggaatatccacctctagtcccaatcatggtcggaaatacctcggccgcgacagagcaagcattcggagcccttctagccccttacctggcggacccgacaaacgcttttgtgataagttcagatttctgccactggggtctccgattccgctacacatactatgttccacaggcccccacgccagggccacaactcccattgtctgatgatatacttccgcaacctggcatggatgcaagcagcgtcgatcaggccgtcaagatggcctcagccggtcactccttgcgccaacgcgatcgcatctcaagcagtcaaccggctattcacgagagtatctcagcgtttgacatggctactatggctgccatcacgacgggatctgcaaagtctttcctcgacattattgaacgcacgggtaacacagtatgcgggcgccatccgatcggggtaatcatggcggccctggaaatcgtcacagcaagtcaagcagccgagcaggaaggacgcttctacttcctgcgatacgagcgtagctcggatgtagaagatattgatgatagctcggtgagctatgtctctgcatttgctgtgctttaatagtgcatcacatggccttgatggcagggcttgtctccttgcttttagttcggatattgggcattagcgctagcgccaaagtaagattgcaatcaatgacttatgagtatccgagtatccgaaacagaaattacatgggtttgacttgtccaatataacatccatgatggcatgttcacccggagccgtgaatgggatggactgtacggagtagcattcacctaaatcaccagtttcaatctatgacaggctcttcgcagcactaatcactcggctttatattcctggcttccacatattgccataagctggcactcggtagaagcacatcgacaaacgaggtcctcatctatcgtgggatagagcggataactccgagtattccgagtattccggctttgtgctcagcagattaggagatcctgtattgataatgaagggtcgcgacaaacgcctcttgacttttaggccagggtctgaaacatattaaggctgagcaccccactgtcgatggctacacttgtggatacacaccgtgcacctagtgcgttgtgaatggatccctgatctcttatactgtataagaagtttcagaatgagatctatcaaatgcctcattaccctaatcaaggaattcaccgttatcaaggggggtcaacctggaacacttaagtccctgaaattagccgctgggctgttggaggcgttattcggccaatccgacagccctaaagtcagataactctgcccctgagtccgttccagttcgactaatcagatcgcagaaaagcttctttcggtttgtttgtccagtgggaatctacgggttagagaacccccgcctggcaaagtggcactatggcagtcggggcgccagcaggattgatttttccccttgaaggcagcagcccactttagggcttgtctaattcatctattgtccgcatattccgtacaaggagtggatcttatagagaatgtggcattgtgaaacaaagcgccaaaagcatataagacttctttaagtcaagtcctatgtccgacctttgatatgtttcttttctcacttctcactccagtcgctccttaagctggatacgtctttcattcctttttatctttcacgtattccagcttcatagagtggagatattccttggctggttcttggaaatcttcaccgcttaaacagccatgttcttcttattcgtggccctggttggcctcttgcctttctttacattcgcttccccgattgcagtcaacactaccaacatgacgtcttccgatcaaaacataggaaataaactagtcttctgtcattttatggtgggttatttattgcattattaaaacctgaataaaatactaacgctatctagatgggcatcgtcggcaaccgcgaaggcgccagcgactatgacgatgatatgaagcgtgccaaagacgcaggtattgatgcatttgcgttgaatattggcaccgactcttacggcgacacccagctggactatgcctatgaatctgccgccaacaacggcatgaaagtgtttatctccttcgattttaactggtggcaggccagccagggaagcgaagtcggcgtgaaaatcgcgcagtatgccgctcatcccgggcagctcctggtcgatgggaaagtatttgtttcgtcttttatcggcgacggtgtcgatatcgacgcaatcagatccgctgctggcagcgatatcttctttgcgccgaattaccacccaggccagggcgatttcgataacatcgacggcgccctgaactggatgggctgggatagtgatggaaataacaaggctccgactgctgggcagaatgtcactgttgcggatggcgataaggcttatgcggatgctctccaagggaaaccatacattgcgcgtgagtatgagtatgtctgttcttctatgcatatttgctaattgaaaaatagccatctcgccttggttctcgacccattacggcaccgaagtctcttatagcaagaactgggtgttcccttccgatctcctctggtatgagcggtggagagagatcctacgtctcagccctcgctttgtggagatccttacctggaatgactatggtgaatcgcattatatcggcccgctgtcgtcgccgcacacagacgacggtgcttcgaagtgggtgatggacatgtaagtagagatatcccagtaaattaacaaagcaactgacaaggaagcaggccgcataatggctggctcgacatggcaaagcccttcatcgccgcctacaaagccggctcgagactgcctatcagattcttagaggaagaaaagctggtctactggtaccggcccactttgaaagacgtcgactgcgacgcaaccgacaacacaatgcaaggcagcgccaacaacgccagcggcaacttcttccgcggccggcccgacggcgccgacacaatgaaagacgaggtgttcatcgtcacgatgctgaagtttccggcgaaggtgcgggtgcggtcaggcaataatactgagacctacatcgcgcctccgggagtctggtcacactcggtgccgatgggcgtgggcgcacagagtttcaaagtcacccgtggcttccagacggttcaggctttgtcggggacgagtttgaaggatgttgtcgacacgtgtgcctgcggcatctacaacttcaatgcttatgtgggcactctgccggcagcggacactgttgacaagctgcagccggctgggttgactatgttgatggacgggttgaaggtgacgcccgagatcaacgctctgggttaatactttggttgggccgttggattccttatgattgggtataagacctatgtacagactggtccgctcacttgatcggaggtgagggttatatgtacaacatcaatagaatacaacagctggtataaccaatgttcgtcctcatttaaatgccgtgtcatcgttgaacatctactttaggccagataccgagtaccggctataaatcagcgaaatccggagtattctttgatgcagacattgctagatacaattccgtcattctataaaccgacctttcgaatgcgagtttgctattgatcgtggaatatcttcaagtcgtagtataacatgttgtagtataagtataagtaacgatctacaaatgcccgaattattttcttccgcatttccttatcttgtttagtcccagatctaccagatacaacggccataaataatccatcgcattccctttatcttcaccgactctttgcccacgttaggcacttggcgctgcccggagtgacgggaacattgcgcccgagtcagcaggtgcaggtgcaggcctcgtgaaactatttaggaacccgatctcgccgttgtctctttgtttttggtcttaagagttatcaacaatggcccgtataaaacagggagtcttctcctgggaggatgtactgcatcagcggttccagagtaagcaacgagctcctattcctattcctacgcttttacatctgaatccccaaatctaacagatctaaaaacaaaacaggcaacaaaccccctcccctcccccgccgccaaacaatagcgttctccgcaccccaactccaaagccgactcctcacccggctatcaccggagcttcggctaatgatctggggattcgtcctcgccggccaacgaatccacatagtccaatgcagcaagcagcgactcgggcacgtggtgtgtccctgtgcgctcgagcccagatcttcaccaccgaaacgccacacgcgccagaacagaaacttattctgcgagatctgccatggcacgggcatctctcagccggcgaaagaggccgatctcgtgcgctgggataaggttaagctactgggtctggccttgacttgtcggcagatgtacggttgagatattacccttcctttccttccttatcctacctaccctaccctaccctaccctacatctacctatatgatgtatccatgacctctcctctcctctcctccccatctcacccagagaaaaggacctcccccactcccaatactaatccaaaaaccagataccacgaatccatccccctcctctacaccctcccaaccctagaattcagtaacccctggaccctcccatacctcctccccacgatcccgcccgaacaccgcgaacgcatccgcgccatcgagctccgctggtccttcccgggccactggctcccgagcaaggactccgtgcgcgcggtctacgtgtccgccggacggacgcagtggacggagacgtgtcgggcggtctcgcagctggaatcgctgcggtcgttcgtgctcgtgctggagagtaactggttcagcgagccggtcgagaaactggctgcgtttttggagccgctgagcggggtggttgttcggtcgagggctgtttcgaggcggaggtgggattgggggtgtattgggagggatgggggggatgtggatagagatgtgcatatggatcttgatagggctggggctcggtttgcggtgaaggatggcttcggtgatgggttcagttcggacgaggactcttgtaagagtcttggatcggattctagctcgttttcttctggcactggggattcgacggtttctacggggagctgggagctccggcttcagggtcagtgttattatacgcatgaactggatcgcgtaggggtggatcttcggcggagaggtgtagattgctggatatcggcggtgtgagaatgctcgatttgcaaatcgcgtgattaatgttctatgatgcaatgatcgtctgttatctagacgatgtcttcttgtttttggcacattgcatgtctcggtatcacttcggagtatgttcaagacaccgttgcagatctacatattataatcggagtatcatcgatgcatactcggcatttctgaacgttattggtaatggatacatcctttagctcaacatacaacacaatacatatgtaacaaatgctaccatgttgctgtttacatattagaattccaattctcggctttctgatcttcccctatactccaccgcatggagattcaagtgagaccctgtacccaccgagaggagtcggcctataaatacatccaataaacaaaacacgtgtttgaccttataagaatggcgtggaatcaagatggtatccagttggattgctccgttacaggtacatgtatgtatttgtgttcatttcattacagaccctacggtgaacagaattatgcgtgagcatgatgatataatgtcgccaggggcaaaaatcgaactcgtctccaccggggacgctaggcgcggggaagatcgcatcataatcaaactatgtagtctcgtatttatggtgggatacagtgggagaataaaatgctagtattgaatggtacaagcccatatagagtaaaggaaatcgacccttgaaaaaggtggtcaggtatataagaaagaaaattgaaccagcgatcctgccaggacatgcaaaagtaaagacaaaatggccgcatccgtgactcgtaatgtgtcgtcgggcagttcacagatattagaaataagaaaggagaaaggaaaaggataggaagatatcgtcgtcaccatgggcgccgggcaaaatctatgaagtgaaaccccggttgtgacccatattaagtgcagaacggtcaaaatggtcgggaaaatcaggctcggatgtagtatctcagagagaaagaaaatggaaaatcgcgtagataaacgtcgtgattcgggcgtaggagagaaattgtatgatcaatgatcaggaggacaattggtcaacatcgccagccattgtggacggacaggcccgggagtctgctcgttaaatctgcggtcgcatatgcttgaatctttgtcaagatagcaatggtcgtccttctgatgctgacgtccaaaaggaatgctagcgcgaccgcagtggctttggtcaatagtcggaactaatgttgcctagggttcatcgaatgtcgctgtgcccggccagtcctccgatgcgagataggaggctgtggaatattgaatatccaggtcgcacaatcgttcgatgagtggtgtggctgatatgaaatttcagaagccgaggggttgttgtgatgccaggttaccagcaccaattttaccgtccttcatgggaacggtcgggtcccgagttaccatggcctcgtgcggcgagccactcggtcgaggcctcctggcgagcacctgggtgtttctggtcctcgcggcgactggtgaggccctgagggagcatgttgttaatctctgctgccagcgcagatgccatgtaacaccggagttccttctcttcacgctcatcctccttgatcaggcggcgttggtcggtcttggacatgttttcgcgacgcttgcgtcggatctcatggattgaccacagaacgacctcttcgggggcgcgattgcgagggcttccgtgtcgggagaaattgcggacgtagcggcgggtgacatcggtcgcaccgtcgatggagaaagccacacagtaagagatcttgcgttgccatccttcggtatacaggcgaggctgatcccaggcgccctcgcaggcatcgacatgaacccatcgccgttggtgttccgagtacacttcggtccagacgtagtcctccgaattccaaacccaacggactcgggctccgactgcgcggcagaacatgctaaagcagttggcccattcaccaactcggcctcgtcgggattgcagtaattgccacacatcggaataccgtgggaatcgctcgtgggcggtgcagctggtatcggaacaacggtacagctcgactcgggttgcgccccgggcggtctcgtcgggagtgggaggagtcatgccttgggctatcgtaggcatgtgacatttcgagcacggagggttattaacaaattggaagaatgaccccttgaaccatctggaagatagatatgttagcaagggcgcaatggctctagatcatagggaatccacataccttaacaatgctcggatgacacaatcttggtagccccattccggtttccctgccacgctggcagcctgggcctgcataatttgagattcctcctcggcctcggaatacaggcgatcgagcggaatcacggacagggcctcatccaatagacccggattttcgtacttggtcggtgtcacggatagccccttcaataaattataaaatttcagtgaagctgcatcttggggcggtgatggcatgatgggaagaccgcgtagtgctgatgaggtcgtcggctttggagagggagcggcggtaggactccctagcgagggaggtggtggcggagcccgcgttggcggcggaggaattgatgaattggacattggagatggtgatgctgagtgagtacgcgagcgagagggttcatgaagtcggttaagtcgtttggtgcgcattagctgctcgaattcgtgtgttaaagaggcggcgtcgtagccattcgagacaggctgggtagcccggtgcctgccgtccgccatagtcgatgaggaagtcacggcagacttccaagacgatgactgttgagatccagaattcctcggaattggcgaacaattcgactttgggcgaaagagatccaatttgaccctacgttcggagaagggaagaggaagtgtaaaaagggatgtcggagacgagtagtaaagaagggactacctcgctcgagttgacgtagcacacttgaagatcagggaatcaagaagggaaagaaagaaagacaggcccttggagagagagagagagggagggagacgggattcacgtacgcagtattacgagcgtcgtcagcatctggccccaatcacgggccccgcggccaagccgcgtgtgcgaaaacgaaaggaaaaagccaagggaaaagaccctttttccccgtaatttccgtaatttacgtatttttgcctcccgtgaacacgtaacgtcgacatccagattttcaatggatcgttgctagtttcttggcgttgtctatactttgatggctgaggcttctatagacatttgggacggactcatcacacacagatgattccaagactattgagggatattgtacttctgtatttacggagtacaacgagtcagagccgaaccccatccactgacgtggctcagttactaagcctttcaaggttccagccctggtcaatataatcatcacggttgggtacaatgacgatcagtaccctgagtagttcataaggcgataataatcaaagctcgtggccgatactccataaaagcacataactttgtgatatcaagctccagtccagaaaaaaaaaaaaagagaaatatcgaggagatgttgtagggtcaacgcgcggccaaggtacgaaagctctcctgtaccgtccgctcgtccactgagaggccggagacgcgcaagcgtccgtcttggcatttcacatcggggccaacagcctccgcctaagccgctttgaggcggtgctaccggcctaatcgggcttagcgtatctagctgaaggggcgcttccgaccctccttccaacctgggaaaggcatcttcatcttctctggtatgaatgtcccaatgcaatgtgagatcctaattcctgggatacctaatcgtccatattctttctatcggaatgtgaaggtgagatccatgatccgatctcccgtgctaaaatatacatcttatgatcgtgcggatcgctagggctagtccgttttccatacaacgataccatccactggaactcattctccatcgccaatcatcgttggaaccacccacgagaagaccctggaaaatatttgaggttccagcttgtggaggtatctttttccatttgcagtcgggcaagtgtcgatctacatgtacatcgtatcggccgaacccgcgctatgtatatacccaataagccggcttacatatgaatcaggggttctagttaagactgggaagaatatattcaagtactccggctctgtatatatctagctcaatatcattatcagtcatgttcgggtgcaactacagtatagaataaatatagttaggtcacgttgatttggtatgccaatcataatgctatttttaaaattcacacgctctaagatccagccctgaaatctattacatctcatgactcggaaatttatgtattgaccaggcgttttatctggggaagtcgatcagccaccgtcgtttcatcttctagccgcgtttgagcctagtgatattctgaggctatgctgggtggctgtgcgatcgaacgcctattattgttgcataagtagttgagcaatccgtcatatgtagcagaatcctggagtttttttttgactaccagatgtttctatagttctgatgccgagaaaggtgtctcgatgcttagctcggatggcgagcaatttcaaaaaaccgggtctgtcacgggaacttccaactagtcttttttttgtcaggtatgttatttttctcttctcatcggtattgacggtaatgacaacagctagagttactaccttaacccaagcaaaaggcgattcgtacgcgccacgcaaggctcatatcagcactgattctcgtcatgggatcagtgccaccaagggagaactgaaagcaattcgggcttaaccagccgagcgaatcaattatccccggacgccaagtgccaagacctcatgtgtctcttcactttattgcttggatgatattctaaaataagacacagcttattctgcaagactgttggcgtatgctatgagcttggctctgccttttttaaggtgccaagccgatatgcatgctctccctgtggatgcatattccgcgcatctagtttccacgcgtcgacacttattcaatacctgcgcgtccctccatcttttagagatctgtcaattttgtgaccgcgaaaacagcgctatcctcaaaccggccttatccccagccaagaagagaggacacgcacgcggcataggtggctcgcggtgcagctgacttcttaaggttagccttacgttggcatagttcgacgttttactccatgcggttttttgttcaactcgagagtgaccccgccggatatacgggaccatagcgttagctagggtgggccgaaacgtcatgcgctaatccacgctaactctatcgttgtcgcaagctctcttcgaggcaattttgaatcttgcattcttctacgtctaattcgttgatatggtggctcgggtcgtcaaattgcccgtgcagacctaaattttcagagtgacgtgtatgcgcctctttctatggactgttgaactactcttggttccgacgtcagaagctggtcacgtgtttatatcgttgccttatcgcatttgtcaacccttatgagctctgcatctgttaaacctttgcctatcaaccttccaccatgtcaagcagagatatgagcaggtggcacaatatccatttctacgacgcgtctaacggatagctcctaggaggtttctttcaagccggttccgtaacggacgctaacctaatctggattctcgaggatgtgttgctagatgcggcggggcattttacgataaagcatcgcatccgatggaatttttataacatcgaataagagcgttgtccctggcgactatgatatttcctgtgatggtaaggctgaccatgaagttgatggaagagtctttgacccgatctgccgggacccaaacgacccaaaccatgtcgcggacgagctcctaagatggcactttcggtaaagcgcactcgttaagaggggtccaggagctgatattcgagtcagactttccccccaggacagataaaatagcgatgctacgaaacgaaccgtatggcaaggagagatttgagattgaggtcgaactcagtcggacctagagccagagaagaagagtcgaaatattaataagaatgaagaccagaagaccatacaaactgctaactagcaagaaggtactctggaaaatcagtgggattatctgcagaggggtgtcattgtttttgcttatccacaaggggtagggctggattttactttggctactagatatcctgcgtatacagccaaacctttcactattccaggaatgtcaggtgcagcctcttcatttatttaacagaatttacccaaagaagaatagaaagatctcactgtatagtccctaggcccagcacaacagatagcagagtgagatacatatggcagtagcaatgagctgaatgtcccttcctcttcaaaagcccgagcccctccatcttcagtattcaactattgtttcgttacctgcatgcattgaactccttggctatttgcaacatagatatcgcatcaggtcataattcagtccaatgacggtcttcatcgcctctttgtgagtttcttcttcatctacaaaactccacagatctgacatagtatataccaggttcctcccgtacaccatcgatttccaagtgacggaacctaaacatggacatcgcgggtccttgtctagccatgcaaatgtcgatggtcctggatctatcgatgaacgccagccagatgcctattatcaaactcgccctgcgggctgtctcccactaacacccggagccacgacggaagacgagacggtgttcagaggatatacttggcgattagcagatgagattccgattgccaatgaccgattgtggcacggcccgagcgagccccgtgccatttcttggggacacagccggaggtttcatcagcccaaatccaaggccacagatcccccaacaccatccatcgtgagcagcagaagggagttgtctttggatggatcacaggatcgatcggacataaaatactacagtagcacacgaagctcgctctccaatgccgaatgggtcgtcaaagctgccgaacaaggtcatggaggtctacaaaatgccatccacgctgctgaaaattcgagcttgctcaagaacaagacttgggtggggacgctaggcatgcctaccgactcattggcggattctaccagaacagacatcgctgagaccctccaggacgtgtatgattcgttgactgtctttgtgagtgacaacgagtttgagggccattacacccatttctgtcgcgcggtactttggccagccctccattatcagatgcaagaaagccctcggcatactgagtatgacggttactcttgggtccaatacctcaagctcaacaaggcatttgcagaaacaatcatcaaccactggaagccaggtgatagaatatgggttcatgactatcatcttctgcttcttcccggcctcctgagggaaagactaccccaggccgagattggatttttcttgcataccccgtttccttcttccgaaatcttccgttgtttgattcaccgcgaggaactgttgaatgggcttctgggtgccgatttgattggatttcaaacagaggagtactgcaatcactttcttcactcctgcagccggctaaggaggctagaggtctctgtcaatcaagtccacctcaaccatcggtacgttagggttgtgaattctccattggggattgatccctcatcactttatacattacgccaatccaccgaggtcaagggttggatacacagcatccgccataaataccaaggacaatatctcattgtagcgcgggaccgattggatgcaccgggagggattaagcagaagcttctggcatatgagctttttctcaagacttatccagcatggagaggacgggtaagtcgagtaacatagcttactgcattttatactaatttgttttcttgtaggtggttttagtccaagtaatgtcatctgcatctgagatcccagagctggaggcgcagatctcaaagatcgcaatgaggatcaatgcaacatattcaaccatcactcaccagcccttggtgctggtcaagcaggatatcagccacttccaattcattgccctcttaagtgttgcacatatcttcatggccaccaatctgcgcgaggggatgaacctgacaagccatgatttcattcattgccaagatggacagcttagctcccataaacatggatccctgatcctcagcgagtttgtgggtagtgcctctattttttgtggccataagcttctcgtcaatccgtgggattacaaacaatgtgccgatgtgatcaaatccgcactcgagatgtcagcgggagagcagaaactcaactggaatttcctgctcgattgcaaatctccctatactgccctcaaatggcacacggggctacaagatgctctcacaaaagcccacgagatacagcaaattcgtcagacaaaccacccctctccactttcacctactgacttgaaaaggtcatatctcgccgccagagcacggatgttctttttagaagacggcgcaatcttcggtccaaatttcggcataggagagtctgtctccctaaacaaagcctgttcaactctaaaaacgctcataaacgaccccaagaacatcttatacatactcagcaaccagagtaccgagcagctccagcaagcactcgaaaaactcccctgcgagctcggtttcatcgccgagaatgggtgcttcctacaagaacccgaatcagatttatggattccattcgtgcctcaaagcgccatgaaatggcgtcccggcatcaaaagaattatggagtatttccacgagcgaactgaaggcagcggaatcgagcatcgccgctgctccctaacattccactacgacggtgcgctcgaccgcgaagtagccgctcgccaggcctccgagttagcctatcaaatcaacggtgcccgcggacgtgcggatttccacgtcgtccgcgaggcaacatcggtgaaggttgaaccgccgcatgttgctttcggaaatgggagagccgccacctatatcctagaccatctccctaatatcaagtatccggagtttctgttcgcagctggtggttctcgcagtgttgaggcgctgtttcgctgggcaaatgagttgggtgttgcccccgttgcttctcggtttgataattccgagcttgggaaaacactccatgtcaccaccgtgacaactagcacacatgctaccgaggcgagatcggtgttgccgtctgattcctcgcttttggctgttttgggtgaactgtcgagtttcacgtctaatggggaggatactgaatgacttactcgcaccgggtttgttgtggctggttactattttcattatgggactgcttgacttattatatagttttgcttgatgttcaagggggggatacacacatgcaatgcagtatagctttcaataactgatacatgctaagtagtcttgattatttagaccgacttttatatttcgagagcgtcgtttcaaatgatcaccctaatcgtctactttaaaggtaaagatacatttttattccttattctctgccacaattcatgcatagatcaaggggatcagcaatcataaaacggtagattggctctcacaactccaccaaccatagacccgattgttgaaaaaaatcagaaacaaagagagtgcaaatacagaacacagaatacgggtaggatatagcataagcaatgattaaaagaaaaaaacatgaatcataagaagcagcagctagcaaagcaaattggtcatttcatgccttgcgtgtcggagctgagaaaggggttaagaggccggagactctagggcttgtcctcctttgaggatgaggctccatcagtcgctgctgagataagggtgggtgccacacggcgcctcttcggcggctgctgcaacgcattatttggttcttccttgctaccttctctttcagactcgcttgcacgctttcccagaacgctactaccagtcgtagtggtcccattttgtggagcgcctgagataggcgtttgtggcggagttgtcattggaagagtcggtggctgcgcagagtttgttgccgtcacggacggaacagtcccgagagtgggagtaggattattcacgactcccgcaggggctggctgcgtggaaagctgtgtcgcgactgagcaggccgagttggaccgtgcgggactggctggcggtatgggtcctgtgctatttggaggggcatggctcgtcttgattggagatggcacatgtgaagacgccgaatgcgttggtgtcagcagaggtgtgagatttgtcgcaggggtggttgggtttgaaacattatgagtcacagaagttggtcctgtgtacgtttggcccagctccccaggggcgaacgagagtgaagagcagaacccatcagaggaactcatgatcaatgttaatccatcggccgacctgttgtgcgttagaaattgacacgtgggtatcaatcatagaaacagtacttaccaggtcaagtcagtaaaagtagcaaaatgcaaattgctgacgatacatagcggggtttgttgttgtgtgtcatataccaagacagcatcttgagtggcaacagcatatacaatgcgataaggaagtgcaaagacgggcgccgagctgtggtttgcttcattgccgccgtgctcggcagcctttggggatggctgaagctttgatgaatccgccgtcgttgaggatggagggactatgtggggttggctggtgaagggtggatttcccgataccacgggctctgggagggacgagaacatctcctcgcctgaagatgtatcaagggtgatgtttttcgcaggctgggtgccctgcttcaacgtgtaaaagaccggggagcatttgacggctacagatggcttcttgtgtcctggaaggtgagagatcgggggcttgttgaaaccagcccgtgtgtagacgtaaactgtgttgatgacctcgtctgtcgtctttgtagaatccgtagctgatacgtgactggttttgaattgaccagctggtgtaaacagcaggcttccgtcaggagcaaaggtcagtcgcctgaagaaagaagtaaacgtctcgttggcatagatactggcgttcttgacccccaggccaccaagacttggggatgagacttccaacggcttaacagcgggcaacgggagagatggagcaggagacgcggatcgccggatcgaaggagacgagccgaacgaagaacgccggctgtgtgagactggaggaggatccatgggtagattggaagccattggtgtccccggagtcgagggagcaggcgaggcaatagcaatggaatttgcagtgcttggttgagaccggctcgtcacgtctggaggcgcaggactgctagatgcgatacgtttggcagggagatccatcttgagcactttcccatgcggtgtcaatgtgaattgtccatccttagtcttcaatgtataaatatgaacggatcggtcggacgactgagtcgcgacaaactcgttaagcggatcccatgctacaccctgaacatagtgagaatgctcggcaatctgccgtaccatttgccctgtattcgatcgttagcctatcgcgttgtatgagaaccgttcgagggtaactaaccagtctgggcattgtaaatccgtgcgatgttgtccatgctgccagtaatgataaagacaccatcaggagaccaggccaggtcgtagatctcagcgccggacgagcgacacatgtgcttcactcgccaagtctctttatcgtccgaatgatcttcacccagagcttgcgtttgtatctccgatggtacccagagtaggacatttccatcgtctccggcagatgccagcatctcacctacatccgtcagacttgcagtcatatgctaacctggagaaaaacacacctttcgggctgaagcggaccacattgacggcttgtgtatgcttcatcagagtactcagataagagacttttctttcctccccggtagactcgactttccagagctgtagaacatgtcagatcaaggtatgcgaagggcgacggagggcgggttcatactcggacgttattgtcactaaaaaaaagtagtcagtaaaccgttcaacactctgagagaacagatagaacgtactttccagccgtagctaaccggcccttgccattgggatcgaaatgcaccgagtagataggggcattgtcattgtgccatgagatgagcaacggggtggccttcatggcgagcgccgcagctcagtgtgttaagcaccaccggttttcaagtaaggtgatatgacctggagagaaaagagagaatagaggatttccgagtccaatgatcaatcaggtatctttttttgccaggtgatatccggggtggttttgaattggagaagatccagttgatctaggtcaggtaagaagacggaggaggaagtgcaattcaaatatcaatgggaggaaataaaaaagatgcgacaaggggttggggacaaggggagagaaggttaagggaagagagtcgtgattcttcgatgatgcttcgagttgtttgcggagaacgcgaccgacggcaactgacaccgggagagggttttgttgacattgtccttttgtatatgtttttgtacgtattatatagcattttatagctattgggttattatatctattagaaatgtttatgatttgaatcggagtacggagaagtagatatccagccctagaggtaagcactaggagcagcatttgaaacagatatcaaagttagaggaacgtgaacgtaatcagtctcaaagactatttattggtctatacggagtagaaaagagctaactatacaatgcaaagcaaccccaacgcctctccaagtcgccatttttcaaagcagaatagcaagtacaagcaccagactctacgacagccactttccgagtctctctccaaaccagcttacagctctctcctgtcgcttctgtcgagcatcctcttgagactttatgaagggcgcagcctcctccgcatacatcttgtgctgctcccgctgcgcgtagtgtgcccgaatttctaactctcgctcatggggtgtgagcttctctaatggcttggacggtttgagctctgctgggattggctctcctccaggaatctcaaggccgacttccggggtttgcgatggcttatctgggttgaaaagcgacgtgataggcggtggcgcgattccagcggccttcgcatcgtcaactcgcttttcatagtctagcatctggtggtagagtttgtcgccatgcatttgaatacgctcttctttttcggcgtcatattcgaaactagatgcgtaaccgagtgcttggaggagtttctgtttaaggaaacatattagaatcgacatgatggagaaagctatgagttccagcaccaactcacagtctgggtcatgaagcatcgcgaaaaggtggcattctccgccgagcacatggtcagccgggcttcaatttgcttgcgccaatttccggtctggaagcagtatgtcagggcttcatgctccaaggcacagttctccattgctgctcgttgcactgtgtcgccgcgctctttgtacttttcaatcactcgtgatgccacgccgactccgggttgttcttcaaggtccatcggcggcttgtaggttttccacagataagcgtaacggccatctgggtagagtgatgctgcaggaactttgggcttcgagggatcggacggttcgggcgattgcgcgggcgtggagggcggcttcacattaggaccaggcacatatttgtcgggcttctcctgttcgaggtagtcacgaagcccgggatcgagcttttggacagtgtcatttttgtcaccccagagccaacccatttggaaatacttgtcgagaataaccaagaatgtgcaatagctgaagagttgaagattgagaacgcggagaagtcggcacaaaaaaggatcggccccgatagccttggctccgaccgtctttactcctcaactaccaacacgacgcgtcttttcgacgccgttcctctaaaatggaagcctgtatgtgctgcggtgaagtgcttatctttgtgtgaaattgctaacaattgacagcgcgagaggagcggcagctaatgcgccagcgcggagctgcgtacgcgccttgtctataccccgcggaaccataacagaaactgacttgctcgtttaggacgcgcaaagcaagagaggtcaattttgggttctcatttggtagcccatcgctcggattatcagcgactgcaccacttgcgactgtccctgaagctcagaatccaccgcgaacacagaccacgccggacacaacaccacgaccgtcaaaagtatcgcaaccaggatcgcaagccccggcaattgagcgcacaccgggaagtgcgcgcaacaagctcccagaaaggccctcggcatatgacgtaccctcctcggacgatagacctgaacaaacgcgaagtaacaagaggagaaagatcagtatgctaaggaccaggctggtgtgctatgctaggaatatgcgctaatgattactaaggttctactaacggatcagaagatactccttctcgttcgaatggcgggcgatctaggaatggcgatgcacagtctgttgatcacaatgatagcacagagtctcaaacaagccacatccaggaacatccagatacagatacacctcctccatcggaaattcccaaggaggtttctccacagcctctcgtcttacccattccggagaccttagtcgaagctcaacccccgatagaagaggggaccaatagcgcggaaccaacaacatcagccgctgaagagcacctagcccaaggcacaacttcagtgtctagccctacggcgcctgaacaagctgcagaaccacaagcgccactttcatcgcctaaaggccaggccgagcagcctgaaaacacaaaacaactacgcgagaaacgacatagcacaccacgggtcgaggaacgaatcgaaataatcaagacgaatcaacaggctaccccagaaactgcttctccaattgttcagacagatcaatctgcaacaaaagccttatcaccgcgtggtagccccgccgaagctcttgaagctagccatgcgccgactattgagggtgatgttgacatgactgagcatgtttcaccacccaaagataatgtaccagaggaagacagccagacgtctcaattgtcttctacggagatgaaacaggctcagcagcatcaatctaccgcgaataagactccagaactgcacgttgaagcctctgtgcaggagccagcaaccgagacccgggatgagcccgcggtagcccaatttgagggagccccaaaggctaaacggcctcgtggaagacccttgctcaacaagaagaccattgaagcggtcgagactgagaagatctcacctggacctatactagatgtcgcggagtcctcttcggggccgggtcgcaaaccaacatcacaaaagaatgaccaaccggaacctgtggtagaacctgctgtgcccaagccacagcgtggtagacctgggaagaaagcgaagcgcgcagctgaaactgaccctgaaaccgagcctgaacctgcggcagcagaccaggcagaagcagagataaattctgcagccccccctgggaagaaatcgaaacgcatggctgaagctgaccccgagcctgaacctgaacctgtggcagcagaccagccagaggcagggccagaatctgtggcacctaaatctcgtggccgacccgggaaaaagaccaaacacatagccgaacctgagcccgagcccgaagcggaatcagcagtatccaagccccaacgtggcaggcctggaaagaaggctaatcatgcaacggagctggagcttgaacctgccacagaagagcagcccgagcccgaaatggattctgcagtacctaagactcaacgtggtaggcccggaaagaaggccaatcgtgcgatggagcctgagcccgagcgtgtggcagaagaccagccggagcctgaggcggaatctgcagcacccaagccacagcgcggcagacctgcaaagaaggctaagcttgcactggagcccgaacctgaacccgagacagaataccaacccgagcctgagcctacacaagaacagcctcgtcgcaagactcgagcgcctcgtggagaaacagtcccggtcaccgtttaccgtctcgccaatgtcaattctctaggtggcgcaacatctacggccgacgggtctggagatgaagaagaatccgccgatgaactcaccacgcatcagaaggccaagatacccaaccgcggcggtgtcaacccggccgatgtattgagccagatctgccgtgagactctagagaaaacactaaatacactcaaggatgggattgcgaacgaacaaaataccacgcgacgtgcggagtggtcgcgcaagagaaaagccgtcgaagtatttggctcggagcttgagagccgcctcatggacctaagcgggatactcgatagcaattttgtgcttggtgtgcaattgaagaagactaagcgggagatgatggatctacggagtcatctataccgggtccgccgagaacgcgagaacatagctttgcagatggatgcggtgcgcagcagacacattgaacaggagaaggccaactcggtgagaacgttccctaacagtcctgacgatagcattactaacaatagttcctagtcacgatccacgatcagcaattcccttcacagccttgaattggccctcgaccgcaacaagcaacgtgctgcttctgctgcggattcttctacagatctcgaatacatgctccgcaccgtcgccgacgtgagttcccgggctcctggagcacaaggcggtctcttaaatcaaatccgagcattcaacgcacagctcgaagccaccgttgatcgcctggagcgatgatgtcatttttttgttgtctttttattcatccgttatgataccaggaatcattttttgtgcaatgaatatagtccatggctgcgccagaggatggcgtttggcgatattttcacctgtacaactcccgatgtgatcgagtgcataggtagctccttcttgttactttcagctaccattgaatgtcagagagacggcgagaatctccaattcttgatgatctgctattctacatgatacacataggtgggcaactctacagtgtattattaattgcacccctgtcgggcagtggtgccaccgggacaataacaaatcagacatgcccacttgctcctatcgcgactagtgagagtgagacttgctcgatctcatgttcaaagacgttatggtctcggacacttaaatttattgcttgttaatccaagtggagacccttggaagttctgcgaagcaagggaatactgatacttcgatcaaatgcaagatataaaaccacggccattcacccaaaatgtattctaacccccagttgaaatcaaatacaatatatacaatatatatcctaaaatgaccaaactcttcactcccctccacgtcggccgcatggagctcgccaaccgcatcgccatggcacccatgacccgctaccgcgcctccgacaaccacgtccccctccccatcatgaaagactactacgcccagcgcgcgtccgtcccaggcacgctgctaataaccgaagccaccacgatctccgcccgggccggcgggtacgccaacgcacccggcatctacaacgacgcgcagatcgcagcctggaaagaagtcacggacgccgtgcacgccaaaggcagctacatctacgtccagctgtgggcggtaggccggccagccaacccgcagctcctacaagcggagggcggatacgatctcgtctcgagtagcgcgacggccgtgagcgcggacgcgcccacaccgcgcgcgctctcggagaccgaaatctacgcctggatcgcggactatgcgcaggcggcgcgcaatgccgttgcggcgggctttgacggtgtggagattcacgccgcgaacgggtatttgattgatcagtttacgcaggatatctgcaatacgcgcacggatgcgtggggaggtagtgtgcagggtcgggcgaggttcgcgcttgaggtctcgcgcgctgttgttgaggccgttggtgctgatcgcacggggattcggtttagtccgtggagtacgttccaggggatgcgcatgaaggatccgaagccgcagtttgagtatctggcggtgcaggcggctaagctgggacttgcttatgtgcatttggtggagtcgagaattgcggggggtgctgatgttgatgctacggatcggttggatttcttcctgcgggcttatgggaaggcttcgcctgttatttttgctggtgggtatgacgctgagtcggcggttcgggcggttgatgttgagtatgcggattatgatgctattgttggcattgggcggccgtttatttcgaacccggacttgccgttccgggttcagaatggcattccgtttgtgccatatgatagggccactttctatgtgcctaaggaccctaagggatacactgattatgcgttcagtgctgagttccagaaggccattgaggcggcggcttgatgtcctgattgtttagcgatggttgtgtaaatcattggatgtatagagctagacttataacagccctagaggacctagcatatatatattagtgcttgaacataatcaaattcactccaggctgtgttggtgccgagataccagattcccatttcttagagtaggttggctcaacatgagtctcctaatcaaaagcaaattgaaccttgcacgagtaccaacacgtgactttgcaaaacatgcgaacctgagccctcataaaaaaaaagcgggggaaatgcagtatatacaggaagcgtatgcaccttgtaagcagagctcggtagttagttactccgtattccgtgattatgttaaacctaaaggatttccccacaagccggttttaccaaaacgtgtgttcctccgacttggcacggagacaaacaccactttggaaaagccgagaaaatgttccggtccgccgagccgaaaaatccaagccgagggtaaatcgacacgttggtagcccataaccgtggattctacacgtattggggtaggtatgtaatggtttttgtgggggatcagatcagatgaacgaaaatgtggggaaaaagacgaacgccattcgccaagcaacatcgtatgttctatgagtaatgtatatcctgcactatggaagctcgtatttcgatgtgcagcactatgctctttagtcacgccaagtccccggggcatttgtatctcgaattagggggaggtagctgggctgaaattggtccggagcatccccatatggccaattattgatctgtgcatgatgacatggggaaaggttaaacgaggtggctattattggtcaggaagaatataagatgcccaggtgtatggtgccacctttgatagcagagtttgcgctcggatcaggtctggatcagaggaatggatcaaattaccaggaaacaggaagaattagcaatgattgcacagtttccactcatgtctcataaacaaaaaggcacgatccaacatgaagataagctataaactctttaagggggggaagttaaagggccacttggccaagaggattaacgtcgcattgacttatggagtacatacatagcaccctgcaggtaatctgtggcgtgtgtgtgttgttgtttattattattacttggcgtacgccacaactccaggctgttgcccggtatgtattagtgaagctgaaaaaaaaagaatccaggtccttggcacgatagcaacatggaagcaataagaaaaagatggctattattgtatactccatttgtacggagcacattagtcctgaatccagcggaaatctctgacccgggccgaatctcaagttggtacggcgtacgccgtacggagcacagaacctccgtatggagcacggctgatacgtccaccataattagccgtaaatcagtgtggagctgaagcttaactcgcttgcactttctacggggtactttctggcacatgacaagcttacgaaagaaaagaaaaataaagaagaggctcgagcgtactaggtagtacgccgatctaggttccccccggacaagggaacacgggaagagggcagactggttcggctatatctttatttaataggtcaacctggatatggcatattgtctattaccctgagacttgagaagcacaattcttaaactgaatgtgaatgacagcatgcgatgtctggtacatcatccgtggctagtgggtatgatatgtgtatcatgcttcggtctcaaaaaaggggcaagagggggcatattatgcgagacccgcgctaagtggagaacaatggatagaagagaggacaataatattaagaaagatacagagtatggtgtataacgaccacagcttaccaaggtgactatatcttactatgaattcattagtgcgtaacccctaagggtctactccgtacatccacggcgaatgcagaataatgattgaatcatataatccgtcacatgggcaacaattggtatgaggcaaaatacattccacaattataccgaggtcatgacgcagtctcggctcggtgtactcgataccgggatttaccaccggctcagccactatcagcaagtatctgctacctgttgcttgctttgatttccatttgcactaaagtactgtacatatgcacgatgtacggagtaaatcaatactctccatccggaatagagtggactggactctacatgatagaaagattaatatctccagagtccagtaaatttccgtctatacaactgctaccatgggacctacagcataagaattactggaacgcactccggatgctaacgtccacggggtacataagcttatggaattatgcatcaggtaagccaagcattggagtcaggcaagtcagcaaaccctcgtttattctccctccaatgataacttcgttccccggatatcccatctccccactttcttccccgggctagttcttccattcatccatggatccttacctgccaattacctaacctgtgaacggtcctccccccattcctccgtgccgtccctgcatggctgatttgatatagttcgttttttacccctgtgaagcgattcaaaacaataggagttggatagttatattctgtataattatatgagacattcccctcccatctcatctttttttcctcttttctccactttagcacactcgaccagactcttatcaaccgtggaaccggtccataagtggagccttaaaaacgggtctgcaaatcattgtaatattaccgaaataccaaaatacctggtaagtttggttccaccatcgcttcccagtttttttcaaatctgctttttttgcattcactccaattggagagagtataatagttctcttccccttccccagcttccttccccggtttcctttttcttccccagcttcattgttctatatctctagcccagcagtgctgtgcttcaatctcatatacccctatacctataacgtgtgatacggctttacataacggtctacctcttttaccttcctctttttaacgaatcagattcattatgtctgccactcaaacaatggaccatgccgcattggagaaggatgcgggtccctctcctccctctccccagatcagctctggccagaacggcgcccccatgcagcctcagatgtccgtcgaagagcaccaggtagcacaagcggccgcgcgcttcggctacggacccctggcccaagtcaacaacaacgaacgatccctgcctcccttcggtggtgagttccagcccggtctgtacaagcccgtcgaaggccgcaaattcgccaatccggctcctctcggcctgtgcgctttcgcccttactactttcgtcctgagcgccatcaacatgggcaccctggatatctccagccccaacattgtggtcggtcttgcttttgcttacggtggtcttgttcagctgctctctggcatgtggtatgtagcttccgtggcctcggcctgaggttcccctgacatgagatctgcgactaatacgcgcttctttactagggaaatggctgtcggaaacacctttggtgccaccgctctgtcctcctacggtggtttctggatcgcgttcgctatcgtcttgacccctggtgggttcgagattggtgaggctctcggcgagtcaagcagtgacccttccaagttctatgactccatgggtctcttcctgctggtaagtgttccttcttcacaagacatgtgcaagaaatcatcccgctgacaatgtaacagggctggttcatcttcaccaccatcatgttgttctgcaccctcaagtccaccgtcgccttcttcatgctgttcttcaccctggacctgaccttcctcctgctcggcatcgcctacctgcagcgcagtcccgacggcagccccaacaccaacgtccagatggccggtggattcttcggcttcctggctgctttctcggcctggtacaacgccctggctggtcttgctgataacagcaacagcttcttcatcattcccgtcgctcacttcccctggtctcccactggccgtgttcgccgtggaaagaccgaccgtgagctcgcataagcgatttcctttttccttttttctcatcggaaaaacagccgggatgcgaagtgtccgctttggtgatttgtaatgttttttgatacccagcgttgtatgtgtaggcgatagactgagattccatccgccgcgttctcatcgagttgtcgattgtgttccggtttggaggcctgtctgttcgcctgtgactgttgtgtgcatggatgatcgatgattctgcactagtgcagttgcaaaaaaatcttttgtccgagtcgattgatgctgtttgtaatttttcgaggagcaccgaggtgatttcttgtgctttctgctttttttccttgctgtatttagtctcttttacctgcgagtttcttgtgactcagtaattaaatcatcgacattgttcacaataccttccttcatcttgtagattgttgtccttaggctactaggtgaagtcgaattcacaccagtgcttgctcttgtccgggttgtatcgcagacaggctgttgttgggcttgagacattgtatatcctcatcagatagtaacattctgcgcaagaaaacacctgccaccaatcatccaagcatgtctggctagtcaagcaccccgacctaggaaggccaagaggctgacaagccgtccatagcctagtataagattcatgtaaggatatacattgaaggtgaacgaggattgaagacaaaatcccaatatcctatagtatgggccaaaaaaaagtttgtttcaacagacgggagaatgaaacaggggaaaaaggtgccagggggacacgggagtatatagataccgccgaaatgagtcttttagggcctatttacctcggacctctccctctcatgcccagggatcaagccacccgagagtggagatgtctgatatcattcggaaatttctcggtctgcacgacttgccaccttgaagttgacaataagcataagccaagaatgtaggattctaattcacaccggttgacgcaactacatcagatcatgtatagatatgtcgcataacattctcctacatacctccttttcgcaggaagtatacgtacatctggttggaatcggttggaatcgcgagaaaaaaaaaaggtacgcaataaagcgggaaatgaaatgatatcgggaaaaaaaaaatcacgcaaccaaagccacaaagggccaagcaatctaggaagagctgcctttctatattgtatcgaaaatcgcgcatcgccgagtctaagccgatctttgcccggctgaagttcggtgcacgttcggcgggcggtttctacagcgtatcagcttcgtcgagcctagggagtgccggagatttttcggatttcgggatgccgaggttgggtttgtggactgatgggcggtttcaacgccgggaatggatgtagtatgtcgggtttgatcggaattgtgtgcttggcttggcttggtggcttggctgttttgaggttgggaggatatatgagctggagggattgggtaggaacaaacctggcatagcatgtacatttagttccagggttgaagaagtggtcaattaggtacggagtagtagatagatgggctgtagctgtttggagaggagtagtcgtgaatcattggaaatagaatatatacattatatcttcactcatgcgtagatagcgagaagtccggagcctggaatatactggatggaagcggttgtatataaccgacttggatgggttcgatctattacggcagagccatgtagccaggttcatactggcgattctaccagcagttgacactcatcccagatctgacgaagcataggcaggtgaatgcgatcgacatagaaaaagcccagcaagatagaacgggcctcctgccaagagtggattccctgcagccgtgcagcattggccagttcagatacaaaaaaggcccgctctgacggcagggttagactgcaagccgcgcccatgaaaagctgccagaggagcaggtcgcgacagagcgcgaataagcctgacgggatggtcgcctcgagggcaatgcgcagagcctggattggcttgggcagtaactggccgatcattggatagaagttccagatagcgctgttgtggaatagcagtaaagcgagacgggtgcagccctcgatggagttgtcgccctttacttggcctgtcatggtgtatcgatctgtgtgtagttggtattctacgtgcagcacttctgtgttgaaatagtcctcggtctcctcgttaaactctttgtagccggtgttgcctttgatccattctgcataccaggatagttcgaggagatcatatacgatctgtgccatgggttcgccgaagatgcctggtattttgagtagagggaaaaggcgggtggaaagtaatgctacgtcgtcgttgggtggaatgagagggagtcgcgctgggcgagtgtagcggacaaaggggaatataggcttggcgtgagccatgcaagcaactcggatatcagtcctaattgcgaggttagcaagccttgcagctaatcatgaaggaggatacgaaccatgagatctggaaccgcacgtctgaagggacatcgtcaaagttcttccgtagtgcgatcatctgtcgcaaacctgcaagatggattttgaggtaatcgggattccccgacgcgatctacaatcatgtataagctttagtaatcgcaagcttggtgcgcagaatatactcacttcaattgtcaacaaggtagaaactgcagcaatcagaacatcgctagaagccttgaccgggtctgacaggccctcgttgaccagccgaatagtctcgccacggtggtggaacgtgtcgatcaccaactgactccgcttttgattcggatctcggatgggtagctcgcctgcacgcatagcatcattggaagtagccatgcaaattgtcgcatgcagaatggccgggtcgcgttggatcaaggacgcccaatgagcctgcaacttgggtttataccgcgtttgcaatggatgcgcttcttgtgtcagatcccagaggactatacccgtgtcagtatacgagctcgaccatatcaggatcggggtgtaaacactcacagactcgcaaatgtcgcatcattctatctgtgagatgtgtatgtccagtatgaaaaggatcattagctccctgtcccaggtaagaccatgcagagggataggccaccgccccaccaaagccagagtcattccatgatgcggcttgcatagcagggtatcccacggctgttgatgtcacaagctcctcgacctgttctagctcttgttcatctgagatttgactgctagacaagttgacagacgaaccaatacacgaaccgacaggcccagcggtatccagtgccccggtgttcgtcgtcgtcgtcggctgacaaggcgagttcttccatttgcttttattggactgctccccgttccccattcgcttcttgcgattatgttcggacatgacatgggaccgaatccgcttcaaggtctcatccgttgtgcctgccgctgccgtttgttgatcactgttgacccagaacaaagtcgatttccccgtagatgcattgtcggctttgcggggtttgcgtactctggtggttgttttccgactagacgccttgggtgggggaggagctggtgcaggagctggtgtaggagctggtgttgaggccatggtctgtatagggtgtatattgggatcgaagtggatgggagctgcatagggggagtggatcggatcggccgcccaagccgcagccgatggccgagacagcacgggcaaggtctgctcgtaacccggtaaaaggtccttggcatccatcgagcttaattagacgttcgaggcattacctatgtaggaggagggagacctggaggttaagaggaggacaaacttcctttccggaccggcggggtagaaatcacaggaattttggattcttcacattgcagaacgaatcactggccccgctaagagttctagtggaaattgacaggtttgatttagatgatttaaggggtttagaggatttaaaggatttagggggatttacgattcgtttgtttgttcttttccgcccctttcgaggactacaagtctacaccagtcgcatgttccaatatccacttgaccttgagaatatgggggtatattcaccgagcttgttctttttaaggtcatgtggcgttgaaaaagagtaataacacatgtgtatgtaggtacagggggaacctcgatatcgtgatctactatgatcagcacaaattcatgaaacacgttgagatacacggagacaagccgacgaagtgtgtatagatctgcattttggcccctgaaaaacatccaacggtttagacgtcaagtcaagattttctgcccctgacagcactagccttacatttgttaaagtgggcatcgcatagcccgagatgaagttcaattgctttattggagtacagaatgcattaatattggatccgagggagctccccaaggtatgtagttacttgtaatagtatcgaagagctagctgtacaacggaaatatccgtggtctactcgatgtggaggcgatgtggggagcaagtgagatagaacgaatgagatagtcaagtgaagataatcatacaacggacgtcggtttcattccgacgccgtgcagatcgtgttgcgcccccaaatttaggtcataccggggcgcgggaagatcggcatcgtgtccagctgttctaacccacccattgtaccactctgcccactgttttgccaaccttgtccggtctgctgattgataaactggctctgtcggaaagggttggtgctgccagttgggttaggccgcaagggagctgctgctggaggctgcagaccttgctgcggagcaggagaggctcgcgcaaaaggattggttcccgtccgctgaggctggatcggctgcgcttgtggtggctgaagcggtacttgcgggggttgtacaggctgaaattgctcgtttgagggattatattgcgtgtttgctgtggatagtcgtctcgcgaaggggttcgtgttctgtcgcgatagaggagcggcgggtggctgagcacctgtatgagagttgagcatcattgactggcggaacgggttcgtgtgctggggttgcaagggctgaagtgcttgctgctgttgctgttgctgttgctgttgtgggaaggcggcaatgccttcctgcggaataggagctaattgcgactggaagccatatgaatgcggctgtggagagtaccctccaaatccagcgccagttggcatagcttgaagcggctgcggcggcggtggctgttgttgttgtagttgctgcggctgcccaaatggattatttgggccctgtgcttgataaggcactccatattgggtcggctggccatatccagttgccaagggctgctgctgaatcgcctgaggctgctgctggaagccagtctgctggggatagaaaggttgctgcggttgctgttggaaccctgtttgctggtattgcattgagttctgttgccccattggctgcgggtcaattgaatcaaaaaagtcgatcagatccacagctggcggcttcggttgttcggcctgcttgggtgtgtttgacgccggcgggtttgacactgggttcggcgcgggctttgatacatctgtggtcgcactggcttccatgctcggtggaacgcgaacgcctttcttggccagatactcccgccggcgaagatcgaaatcaggatcgttgagatcatcttcgagaaggcgcgccaaatctgtggaggcatgtttgagcttcggaatttccaagcgagtagcagactcgaaatgtcttgcgactcccaaaaactggaccacttcttccgtttgttttgtgaatgtcttgtagattgccaaggcgcgtacactatccggccgcgacatctcaaagtagtgttctatttcggggttaaaccaatgccgatcaatggaggagctgctgacttacctaaaacattaatcgtaccctcattcatgactgaatatagagtcaatagatcaagtgtgaggagacggaacgcggtcagactgatctcgttctcgggctcatccgtcaacaactgtacactgtcagtcaccaataaaaggcctgaattcggaattcacccacatcacatcgcagtaacgcacgaatttgcttctgtacgatttccgtctccctcaaaaggcctttatccacacctatcctcttcagccgtcccggtccgcttcgtacatggtccgtcttgcaggcttcgaacgccttggcacgcgtgataaggtattcggcatatcgtcggatattatgcccttgtgattgggctataagaacagtcagtagactgcaatcacatcaatatgagggaactactggtctaaccttcagagaaattgctgggcgtgatcttcttcgggttatcggacaggtatcccagcgcagcatcaagttgaccctctcggatcataagatggagcacgatgagtgccttgaaaacaatggtccatgccgagtctcgaagccgtatttggagggttcgaaatacctctgcgactcctgcctcgccggtatgagttgccacaagaatattctctatgtatttggatttaggggccgcaagctgttcacgtcagatatttaataattgtcgcatgtagaaaaaagaatgagctgagaattcggactgaccttgagcttcgtagccccctttactgacttctcaaatccccccggcatgttgttcttataagtcgcgaatcggcgcccactttggctcaggagaatagaagtctgttagaagacagtgggaaagactggagagcctgctccgagaatcaatgcccttatagtgtccgggtgagtcctcaatcatccgtatcgttcatgacgtggctcattgagccatgctgtgagcctggggcaagtgggcaattttctaggggatagggttcgaagtccgatcggaacggccgggttaaggattggcgagaatttgagatcactgagtgaatatgggctgagaagcaaattgagggataaggatagcaaataagataatcccaagggtgagggcaaagggagttcctgggggcggagtgcatgttcctcgaggcaacctaaattgggactagcgcatgttggcagttcctcgtgcagattagccctggagtatacgagtactatatcataacgaactggtatttagattatatatgaaagattataggctatataaactataattggatgaccatatcttggatatatccgttgatcgtaatatttgaatattgcgatttcgttcctatatctagagattatatatcacggtatccttgggtttatttgaaaacatttcgatgtagactgtggcatatcttgtattagacgatataatataatagatagctagtgaccgtaagccagccaaggagttatcattaacacagagggaacctgctttgcacaattggggaaaacaccacgaagcaacctttttgttggctttttaagatcgaattgaatgaagagaggaaagagtagatatataacatccatttcggaatacagcccactaggcaagtaaaagactactggtatttgacgtagatctagggcttcatacttgaactaaagaactatacaatactccacttatggatcatgctagaaccaagctagtcacaaaataagaatcaaggtctgaacgaccttgattctatcaattatctggccagagaagcagttatcttgtacgtagttgcctcaaacgtccgagatgggcaaaaatgtacctagaatagtgagatcttcaacttctaccttatcccaatatgttaaaggaccagatctacttttgggctgaagataggttctctatttgctagcatctttgaagaagatttagtcacatatgagaccgaagatatgtccattcccagaatgttcgagggacgggctggttattcaagtctgagccccaagagtaatttatcgtttgttatacccttctcttacttttcttcccctacccttctgactctcatccttcaaccacccctaaccccgcagacaccccaccctatgccattttcactgtcccagcgaatagcagatgaaatcaccatgatgagtctcagccgcagtcggaaacgaaccgaccagcttgaaaacaacgagtcggttgttaccagccatggaaagatctgcctctggtgtaaccgtgaattgattatcgacggaacagatggtcgtgatgaccagagccagcccactcgtcccaaccaagccataatctccaatcaaaaccaacagttccaacatagacaccaagagcaccaagaccaggaccagcaggaccatcaagaatgccaagagcctcaatatcaacatcaagatcagcaaggttgcggacagcagcatcatggcagacaaggccatcacattgaccatgagctggctatgcaaggagttccggccgataaaatgccaccattgctgtttcggtggtcaaaccgtgactcccaaggaatcaactcgaagaccatgtttgtagccgggcttttctgcaacggtgattggtttgactccgaagactgctccggggaccgtttcgagggcttctttcggagccatgtaagtaaacagaaagtcagaacccccttcatctctaccttccgatcaccattggcaccacttcaccgtgccattgctggccagaatggcgccatagtgaccgttattgacacgtccaagttggagaccaaagtcttctatgcccatccgctggctattcggaccgggacgcttgtgtacaatggctggcagggctacggggagtacctcatctggggtcgcgtcccagctgaggcaatcgctttcagcgtggatatcgtcagtcttgagggcatcacacagtcacaccgtgatttgaaccgcttggttcagatcccccttatccgcagctctctacgctgcagtgatactcttcgtgacatgctggcgttgaggagaaagtcgcccttccaatctggtagaacgctcggaaagtttttgacccttctccaagtgccaaggatccactgggcgaacttagcatctgagttcgccagggcatggggttggaggaatgcgagagagacaaaaatattttacagcggagtgaaaagtgcacctccttacctgcccgaggaattgacggactctgagagtgaggctccatggcccacacctcgaaagacgccttggcagaccccccaaaagatgcacttctcacccgactgtgttcccgacttagactacgaaccacccgagaccgacgaaaggtcggaagggacctctgagtcggaaggtgtgtccagttctcaaactatgtcaatgtgcgacaagacagagaccgcggatgatgggaacttttcaacacatgagacgctgtctagtggaatcttcccggagaacaatggttccgaagacttcttggcgcatatacatagtcaagaggcaattgacttaacctctgataatgaagatactagttcccagcgcgcattgcagcgggactggccgtcagatgacgatacatacatgtatcctgacacgcccaccaaaatccgagggaagatctcactgcactcggacaataaagccacctaccgccctgtactcaatggacagatggacatggacttttttgaaaagttccggctttggacttagcgtacaaactgacgatatgtgaaggtcacgaagaatccatgcttggcatggaagagaacattgaagaatctttgtttggcgcagctatctgaagacgagaaaaactagtaactagtcaatgtgtcaatttgcctttgtgatatagaataaacctcctggcaatgctgtctctaatatgtgcattgcgaacaaagtaaataattggcatattcatgatcctacctccttcgatatctaggcaagtaggtattatgcaactaactagtaatataaccatatatgcccgaaataatatcaaaactacgcatacagacagccaaacgacaacccatgccctagataggtatgtgatttgccattactagagaacacagattaaggtcctactggatcaatgtagacttggaagagcaaggagatgactcgagatgcgcattgagaggctttgtctagattgccatttatggtcaatcttgccctgtgccggagttggtgtacagtttccatcgcaggaggaccgaacaaatcattttgatttttgcgtggatacacgttcatgtgcgaggtatctgggacatggaaactcataaactatcccgacccccatccaagaacttcctgtatatccagtccataccgcttccttcgccttcaaaacacccggtttattaacctagaacttggagaaagacttgacagcgcgcgaggtcttggcgtgaaccttcaacacgttgaagcgaacctagagagaaattttagtcagtcgtcatgtccgtagcaaacaaagtaagctgtcaggttcgatgtcctgcagtaatgcaatagtgtgtggttttgccaacaatgacggaaattgacaaggatcactagatgaacgtacagtcttgctgagaggacggcactggccaacggtaacaaggtcaccctcctcaacacggaaagcgggggagacgtgggcagacaggttcttgtggcgacgctcgtaacggttgtacttggggacgtagtgcaggtattcgcggcggatgacgagggtacggtgcatcttggtggagactgtagataatcagttagcaagtccccctgcctggtgaaaaaaagacagttccaattcaacttaccgactttgccgacgaggacacggccgcggatggacacctgggaagtgaaggggcacttcttgtctgtaaaggttcaaaaatgagtaatctgacacggaaagattttggtgattgcggggatttttttttggcatgagtggtcttttcgtgattcgagagtttgagtgatgaatgcgaatattggcgagagagggaaacgacggagattccaggcccctcaattgctccatgcgatcctccattcgtcctttgtatccatgaaaagaccacccacccatatatatcccgccacaatatttcgaataaaaattcaacggaggtcgtgcataccgatgtagcttccctcaatggcggtcttgggggtacggaaaccgagaccgacatccttgtaccagcggcggccctgggcagtcttcttggacgaagccttagccttggtgttgaggaagatgtgaggctgcttctggaaagcgcgctccgactggacggtcaactcggtggccatttttgcggtgttgttcgacgaggaagcggtgtcgaggaaatgtcgggttggcggctgtcgaagatgaggaagattcgttgtccgttggaatctttggtaattcgtagtgtgcgacactagtcctaatcgggactaggctaattggggttagggctctgcgcttttgtttacatcacgtgattgcggaggcaacgcgctttgggcaggtgcgataggagtagattacaggctcacctgggcagtcctgtttgatctaaagatcccgacgctcagatttaccgagtatgcaaccttgaattgatctgtgaatgtgccgattcgctcgccgacaatgtcaactcgacccgactccgcggctttgcggccgccgcgatctcgtcggtctatcgctcatgtcccgcggtctaggatgacgtctagtttggacaaggagaatgcgacaactcagattggcgcagctcagccattcttgaataacacaaagcctgctatgaaagacaagaagtctcggagcaagagtttggggcctggtggactagatgccctccagaattctaacggcaatcgtcgccaggtagctatcaaacggaagaccacgggcgcatatgcagaacaattctgacttaaaatatctatagtctacagcttcttttccactaaagtctattctcaaacccacagtccctgtgtctccagtgcgaaccattccgtcattcgaggaaacgcgccgacgtacaccagctcgtagtaaacagcagacacacgacggcacgatggacggacagggccaaacagaccaaaagaaagagggtcttttgattgacttcgaaacaacaccaggacctcccacgacagataatgacaatgacgacacggcgaacccgtttgatacatttaatgcgacttctgccattcgcgaggagatggctgctactaaggagcgtgacgaacaggagcggaaagatcgagaacggcagaatatcttagagaaacgagccgcgcggaggaaatcaatgggtcagtgtgttccactttgtcatagaagtgaatattgacacagatttatacagcgaatcgccgagtatcctttgcccccgaggcaaccttacatacctggaacgtggtggaaattccggacgactcaacctcctcctctgccgcaaactcaacaagacgcgcatctgctgccgtaagctctcagaaccaacctgcccctgcctcgcccaccaaagacgctccatcttcgccagcagaatcggaattcgaattctcacctgtccgcacacaagatctaaaccagataagaggtcgcccatcatctggggatgatgacgttcaggatttgtcttctagtccgttcagcggaagctcagtaggaagcgaagacaccggcgcccaaagtctggccggagaagatgacgatggcgattcttcagactccgacgatggatttgatgctgagagcactgcaatgagcatggatgatatgaccgcgcgctcaggcatgagtgtccaatcagatgcaacttctagctcaagctctagtgccaggctcaacgaagcactacgtcaggccgcacaggaagcaggaaccgaacttgatgagggcggagagatgtcaatggaaattgtggatcaagaaataaccggtgcttttcagccgtggatcaaaaagggccaaaggcaaagctttgactggggagatattagcgcacgacatgatgaggagaacctcgatccatccaaggcggccactactcaaggttcaccagaatcagatgatatcgacgaggacgaagaccttagcatggacgtgacgaatgccgtaggacgcattcttggcaagtcccccggccgtcgccagagcacggctcgtcgccagtccgtggcagaagaatccaactatggagatcaaactatggagatgaccaatgtcgtcggtggcatcgcgcaggtggattcgccattcaacttttccgagattggcaacgaagatgaaggaatgacaatggaattcacatcagccgtcggcaaaatattgggcaaccagcctacttatgcctccaactctgatcacatgaacttcgatcaagagaatgagtctgacgatggtatggacatggagatgactggtgcaattggtggcatcctacagtcagggatcgaagccaatgacaaagtgcacgcgaagatgataatggagcttgaaaccgattcgggtcagcttgctagctcgccttttcaagacaatgttcgacagtctcctgccaaatcacccctggcttatcagattgctgctgttgcatctgaaaatgggagccccagttcggcaactatgcggcctaggcctcctcggcgtagctccaccccaggatcgtccagccggcaaagatcaccaaatacgaagccattgactccgcccaaacagtctaccccacaagctaaacctaccactccaagcaagacacccccctccagcaatgtcacatttagaagtgcttcgccaaagaagctcttccaacccgaactccagcaatcagcagataagcgcaagtctctacgccaaagcctgtttgagcataacatagcaacaggagagtcgaccccgctcttcaaattgcaaccacgcgagagtcgtcgctcttccggtctagggattgacaaagaaggtctcggatctcctcgcgtggcggccttactggacaagcgcccgtcgcttggggatagtacgccccagttcgttccgcaagaacagccccgatccggtgtacgcttcgaggatcctctgcaaatgcaggccgaggaagaacgtgatcgcgaagaagaggaactccgagaggatggctatatcaggggattgcagtcagatcgggacgtaaccccaagcttgaaggacttgatttcaaacctgagcccgaagaagactaggattggcaatcgtaagagtctccatgttggggctgctcgcggggttttgggcaagcgcccggtcgagctagacttggatgaagacgaagtggagaattcgcccaagcgactgcgtggccataatgtcagcccagtcaaaggtgtcaagttgccaacgccgatgttcagggaagccaatatccgtcggtcaattctgtcacccgtccgtagagctgctagctcatcaccccccaaaggcagcaccacgccttcccaacaaccacggagttcttcccaaacgtccacaactcctctcaatcatgggattgatgctcttcatattgcttctgatccccaacaaccagaagaagaagaggtcactcctaccgaagaagcccccgtggaaattgagtctattcagctgcaggacttcctgaaaatgaccaatattcatttcatggaactaactacgacaaagagaagacacacaactgcccccgggagtgccaccaagaagctgacacgaccttctggtgagagcatgcctaaaccaggctcgataacgtttgatgattgtgtggcagctggcttttgtaccgtgccaatgcttgaattataccagcatgtaagtgatactataccctgatactcttgttctcgctcacactgtctctagtcgtgtcgggagttgaagtcctatatttctgaaggtcggcaagtgattcgctctattgaggcagaaacatatgccgaaaatccagctctcttcaaagagtatatcaccgctcctccagatatccgagtgatcatggacaatcagttccgaaacgtcaaaacacatgcccgtctgctgagtaaggccacatggtacgaatggcggatgaagttgcttgaggggttgaaggaagggctcattcgccacgtggaggaaatgaaagcagatgacgatctgctatctgaacgagaagagttgcttaataggaacgtgccgtttctcgtggagaagcacgcctccctggaggaagaagcaaccaacctgaaacagttggtggaagagatggaaaactgtgatcaagatgagttgcgcaatacgcgcagcaagctgtccgaggtggactccgagattgcagtcaagagacgtgaacttgagcagttgcagaaggaagtccaggccaaggggactttcatcgaggctggagccgaaatgcgggatgagttcctggctcaaatccaggaggcagagcgtgtcaaagaagagtgccgtggctggagtgctcgggagatcaacgaactgaagggtgagctttccctatggagtttctttttttgtggctgcaatactgactgggaaaactagcctccgtccaacgaattcagcaacaaactggctggtcgatcgtttcggccgcaattccttcggatgatgcatcgaagggacctttattgaagatggcttatcgggataagctccaactagagttctatcccggggcttttgcctccaagaaaagtggccaggacgagggaaagaactacccgatggaactggcttcccagaagaatgccaacatttctcctattgcatccttggtcctccactcgttgcagcactacctggctactatccagcaatccactgtcgcacctaagcagcttttgcgcttcatctctagcgcatgggaccgcacagttgggctggaaaatgaggcgcgcatgctggaattctgtggtgttacccgcctcaccctgtccaagcctgatgtgggctctctttctctacgcacacgctgtacgctcctcggtaacgctaccgtatccacacctggccgtaaaggcattgcctcgaagaacaatggtgccaagagaatcgatgttgacttcactgtccgtacccgcatcgataaagccaatgcagagaacactatcggttccttggactttgatattgacgtcctggcgacgaaggtctatgggttcggaccaggcagcaagtctggtcttccagacaaggagttgcaaagcattctcggcaaaggccttagtcgggaaaaggacggtgatgttcagctcggaaacggcttgtggtgcaaagcagtgcgcatactcacgggatctgtgttttagttctcatttatgatttggttattggatgggttagctctggatttggaaaggaaggcgcagaatgagtctttttcatgcccttcttgggttcaatggcgcggggaaatgggatatcttgacttcgggatctggctgggcgttattttttatacctagtctttcttttcatatccactgattgatcatttgttttctattacactactagtagctacatcaacactcgtgaactcttgctaatgcatatacaaacaagagagtagagaggttgtgtttacaacgataacgataacaacaaatcaaaatatcacaccccgatcaatcgacccttagaacaaccccaagaacccattaggccagaccggatccgccccctgattcggatcctccaggccttgttgcggcatataaccataccccagactttgaggatcgaacccaccagcttgagccgtttggccgtcaatagcaggcgcgccatagataaacgactcagccgatagaatcggcatggaaggatatgcatcgacaggctgagtgcccgttgggatagagggcggaaaactgtagtcagtcgggtagagacctgcgaagatatttccgccgtgggtccagtcgccggccacagggtactggaagaaatcggggattgagttggcggtactgctgaaggagtctggggagtcggtgggattgggagtcatgcctgatgaccctgggggttgggttgcggttgtgggatagtcttgggatagttgccaggatgggattgacggtgcgaaggtgttctcatttgcttcgtgaaggaatgtggttgagggtgagtatatattaggtgggttggcgagatatggggattgtatttgagtgttgtcgcccgggtctggcattgggctcatgggaacgacgtagccggaggaattgaccggtggaaggccttctaaggtgtcgggaatactgctgtccatcgtggtggggctggcggtgcttgatgctggataccgcggagctgtggtgggggtcattgttttgcggagggttgttggtcggcggtgctgcctttggtggtgtggtgctggctgtgtccgagatgtatgcctcttgcctcctggtggtttataatcttggtcttcgtcgtctggggcgcgggctcttttctcgtctttgtcgatagctactctggcgatgcgttcgagggtcgcactcattcgggccatgaaaccggcgtaattatttgatccttcacctgggggggtgagagttgcgaagaaggccgagaccatgttgagggattgaaggtctgctcgcacacttgaatcgcgggtatcccgcagaatatttgagaataatgttgatgctgccaggaagacgtagtataataatgacctaagacttgagtgtgagaaatgaagctgataagaagactgttgtacttaccaggtccatgcgatatctccccatggcatgttattgacaaccttcagggtatctcgggcagcctgtgcaccaatggctgccgattttaaggcatgtgctttgctgattgacttgacctgctctgattcctttctggctgttatcatgtagttaagaaatataggtacccgatgaatcatgatcacagcattgtgatagacgaaatgcagaccaatagaggcaaagccaaacaggaagtcacgttcagtatgttttattttcggcccagtgagagttggggatttgcgtttccattcttcaagctctgcatatagttctttaatcgtcttgtagatttcagcgggggatttttctaatgccttaacggagtacaatcgactgtagatgtggctcttgatgagcgacatcagacagagctcgcggaagaatggaatgttgcttgcggtttcaccatgcttatcgccctccagttcttctggaagggggacatcgaaatcatcttgatgctgtgatggggcatttccaattcttaggcatgtactggaacattgggttagtacttgatacggcgtctgaatggacttctcttacctttggtcaatgacaaatgcaacccaaaaaacgcgccgtctctcctcttgctcagccggactaagttccggtcttggaatatctcgatgaagtcccattcggtgaccggagcgcatggctgcagtaatgagcggcagtgctgattgggttcccgcatttccccgaaggaagaacgcctttgcaaaattgttagatgcttccataggtgccaaagaaggaggagacgtaccatgctaagcaatgcctgtatactcagcagatcggtgcgtttcaaggctaattcagtgaagaccgacatcgcgtttttgaagtataactcggatttctccttgtctttttctgacttggagctactcgaggatcgatattcatatgccaggcagattaccatgttgatgttagcccagcgcgcagcatcatcacaggtttgctgtgtatattgccattcgaccattttcatgaatgacgattcaagatagataggaaatagacggttggccgtccggaagaaatctttgataagagagaatacctctgacctcgagggcaaaggtttaaaaaccttcgaggcaaacaaatcctgaaacacgtccggtcgccattgattccatggattttcatgacgggattcaggagatatcattcgcaaaaagctcacatcgcctgctttgctcttgatccattctatccctgttcgcgatagaattgacattgagcacgacgttcctatccgtgagttagtctggacggttttttttatcacatgggcggtactgtctatcttaccgaaatatcgagaatcatctctttggtccgtcggaaagatgggtgtaccttcgatgaacccaccctgtgagcgaagagacgctccgaaatttgattttggactggaagcagatgatatgctctgactaattggtccatcatcatcatcttcgtcggaaaagtcgtcatgactcatatcgctttcttgcaagatgcctgccgtcctcaacaacgactcaaccctgacaaggcggtctttcaaagacttgacatattcatcagtactgtgaaataattagccatgatcgacaaaaagccgatcgggacatggcaatggacatcgccgtacctttgctgattatcccgcttctcatgctgggcggggaagacacattgcgtattacggcgcatgcattgcacgcaagtcgaattcgacccttcaagctcacacttggtctttttgcgatgacacatctcacaagcctagatagacattatatcgccgttagcaacgctggattcccccttaaccggagtccgccgggatagtagaactcggaacgacaaacaagaccaaccctcaggtgctgtcctctccaaagcgcagaatccatgggcaatgcgttctgggaaggtgactgcttcattgccttggtggcggacggttgtggatgggagtcatgaacgtgcgtgccaagacttttcgaaaaagtcgcccgagcggaaatggcgaggactagcgggagatctttgttccttatttcgatctctcctgtttgatgtctactcataggcaaatgttcagaatctgaagggaaagagaaaataaaaggagatgaataatcaaggaccacggatttcgggactctcggattccgttcactttgtgttccggccaagtttgtgggatgttcattttacggagcacggagtacgtgtcatttgatgtcttttttttttagatatcttgcatctcggtgttataactgaaaggagcataaatgtagttcaaggttcccttaattgtgttcgaggtattcctaggatagttggcatgtgtcaaatagatctcatgcttatcctgtgagatcatcggtatctataagcgctatatgtaagccttcaaatattattatctagcttactagccgaaaagacactgccggagtagaagtacatcggtcacagttgggatcctcattgtaagagctttcaggaggttcgtcggagacttgttaacgatttgttcgtcaattgttctgtaggatatggtccactctatgtcgcagctgtcagaattaactggtcagtgccgaactaatggtaagtggtgagatctgactgggcctagagctgacacctgctgcagtcatcctagaccgagggctaggataggggtgaagtcggaattggtttgtcgtaatattgaggatctgaagggtggtgggagagcataaagaatggtgaagttggagagacaggggagatattcatatgttgatgagaagacgaactcgccgaactacctgtttgctagctagagataatcccctttggtagatatctttttatttgtattttttcctctcagcgttatagccaaaaaataattatttactagagaagtgccaataggagaaagtcgtacccaattctgacccttcacaccgtctttgggagtaacttaccacttgtcacatcaccacatctggcactatcaacctttttaatccttctgagaaacggacgcaaaatttcctggcatggctcctcgcaagacatagatatgttgtgtatttatacatatctcaccctgcatctcgagaaccgtgactgccgaggctaatactaccgcaagaaacagccgttatttcttgagcgcatcttgcacgacaacaattttctccatacatcctctgcattgaccctatgcgaccagaagacggagacatcaacggccagcacacaaaacccaacccaatgccggacttgtaaaccgccagctcgggtaagcttctgtccgctgatggcaagtctcgctatgtcggcagtgttcttgatgatgaagagggcgacctatgtgaagtatccgattccgaccaggatgatattggagctatgcaaatacctcaaacgggcattttgggtgtcctcgcagtacacacaatatctggggccgtactcggaagcacgcatagcatcaccgggtaacaccctggccatgaggaggcgtccaagctctggaatgcgtacgcacaaaacgtggagcctctgtgtaaggttcttcatcttccagctgtcgcgaaaatggtcgataccattttagagtaaccttccgtggcctccaagagcaacgaatgcctgatttgtcatggccgtgcagaggtgggatatttgtgcgcttgcagcaagaatcttcgatacaaccaacgctatctacggcagccctagcatgcaaaagtattgatggcaaatataagcttcattcctgtgggatgctatcgcatgtgtctattcaaatcacgaggaacttgtcgaaggcagaaaacccctatattcacaatcggtaagctaccaaggcctggcttgtgaatcccctaagtcagtcgtccccaaagccgactttcatcactgcgtgtacgaaccgaaagtaagcgagcagcgggagagcatggatgtaataggtggaaccactaagcttgcggatgatgcatcggatgcagttttcggcgacatggatgggacaggcctgtctttaaatggcggtctcgactcttcagattgggttttctgggatcagccgttttgagagaccagcctgggctcagtctacatcccctgtacgtacgttagtaaggtttgtccggagcgtccaatgatctcctaaaccatagatcaagtagctcccagcaatactcatgattcggctttcaactctaaaacaggaactactgagacagcgaccattcaatcaaacccaccaaacccctggaaacccaccaaacccctggaagcccataaagcccataaagcccataaagcccataaagcccataaagcccataaagcccataaagcccataaagcccataaagcccataaagcccataaagcccataaagcccataaagcccataaagcccataaagcccataaagcccataaagcccataaagcccataaagcccataaagcccataaagcccataaagcccataaagcccataaagcccataaagcccataaagcccataaagcccataaagcccataaagcccataaagcccgtaaagcccgtatacaaattagggtgaagatattggaacaaccacatcggtctatgtagaattcatacctcggcaagtcaggagtgatgacatagttcccatcgggaccggattacggaaggaccgacgcaccgtccaatcggacgaaatcactcttcgggccggcccgacacactctagtactgggtagtagtatccttcagtgcctggcccatctggcctttcactattgcctgaggttgaaaagataaactattcaaaaaagctctcagtctcgtttaactttgatatattcagagatacaactgctcgaataggagctgtgatagattcaaaataacagaaacgggggcgaaggagagagaaccaatgcaaatcccgatatctcgaaaagtaggaaaggagcaaagaagcaaagaagcaaagaagcaaacgaaactatcaacgatctccagcgtcatccaacattcagatcgtgacaggagaaaggcagcacgcgattttgaactgtcgaagtcgggtatgcaaaccctctcaagagtgagttcagcgacattttcccttagacgaagacgcctctccctgtgatgaggacgcctttctcgctcgaaccttttccatctcatccgtcaattgaaggcagtagctcataatcaccatagcaaaatgacgcatattgcttttgctttcaatgacccacggtccataatcttgcatggtgagaaaaggcagtgcagttcccctcgaaggacagagatctccttgtaggtatgcggggtattctggcgggtactgggcaagtgtcaaataaatatcgtcttcgtcctgtgagatcagcaggcgcctataagttctcgttagcatataaacattcaacggcatattattatctagcttaccggtcaagaagacacttccggaagttcgcatcagtcacgatccatgtcaccatctgtgctgcttcctgccataggacctcaggacgtgcgctccagcctcgtcgcgccgctatcacttcgatgatggcgaaggtttcgcggatatgggaaccttcaagataaacattggtgcaggcagtcatctcttgaccaccgagacacacagtgttagggaggaagtctatcgacagtccacaccggaacgttgattgtaagagtcctgaggaggttcatcagtgactcatgagctacctgctcgtcaatcgttctggagagtatggacattctgcatcctctacagctgtcagaattgagggcatggtgagagacagaagagagctgtattatgtgacgtgccaagtcttgcaaggatagaagagtgtatcaattcaaaataactaagatagagagagagaaagaagaagcaagttgcaaagtgggaagcggcggcctgcttatatggttgaccttagcaatcataacatattagtatagaggagacaaacacctagaactatttgtttgctagttagctatcatagggtgtggctaaacctgctaggcaacccacacgtatctttcaacgcaccctgttgactgacttggagattcacaagccaggccctgggagtttcactggactaggttattagtattatatttatttaagttcattgatgccgccgatttcgcaagtgatcgaacacatccgtacggtctctccagcccaactagttggcttatattgtagcgaaggaagagctccaccggtgctgtatcatcgtcctcgaagctccacagttgagaatactgtagaatcaaactttctccatcaaatgaagcttgaatgatccttccgtgctgttcgcccatataggagagaaccaataactatagataggtagagacaggggattaggaagactttggctataatccatggatgcgatgtgggttgcttactgggtggataggatatttccggaagggcctgtgggatgtccgaatgagcaccatgttcactatagctcttacttcatggagagtgagacactggtcggcatgatttgctggaacgtgtgcaatattttccataatcgcatgtggcatagggaagttttcgtcaccgccttcgaggagatccattatgcaccagtatgccccaaagtggtccccggaaagcggggggtcgttcatctttcttttcgccctgcttgatattcagcatatagactcaaattcctgaaaataatcactgtttactatctctcgcagtgtaagagaaccaaggccaataagagaagtgcatggcggccgtcccttccggcgagcccaatgctggcagtacatatagaactgtaattcccgggcatgggtaagtcacttctgcggccccgccagtgacatgagttcgtcataataatcccttgccaatctgagagggtcttgtacatttggacattctgtgaggacatctctcagaattgaatcaaagtctgggcggttattcagctttggaaggcagcctccttcctttggatatatttggaggactcgctccgggtaaggccgaaaaaaacatgggtgaaattgcagattaccggcatctgttatccccacttgagatgcttagattccgataccttgaagatctctaggggagagaaagatgaattcacagtcgttgactcgtctatagaggatttgtatgatatcgtgccgcctggttagggtttgtgcattcatccctacggggaaatggtgagatcatgagagtggaaagacagaggatgagaaatcatcaacgtgagatggagtgatgtatacacaaggcggtcaatgctggggtgtattctgccacgacactttggagtcactctctaccaacagcgaccatagggaggcagaaggataaaacccacaacgagacctcaagaatatggggcgatgatatgaagtggtatgacggatagaaggtagtatagaggctattcataagaaggccacctaggcaatattcttaccaaaatagttgctgaaactacatatcctcatccagtgaatatattttgctctcgggccttcattgacacatagtaatccttctgtaacagtggggagcaagaaattggagccggaaatagtacacatgtagtaatgatcaccgaattccatgactaaaatcgacaggatgcttcaccatgcacctaactagtatgttgtacgtgacccctaaaaccttgtgccttatgattttgtgggttgacaggtggatgtacctgatatgtctcaagtatacaggacctggtcatcttgggatatgaatgtcagttgatgtaaacatgatgccacagttatcccgatccatttcccgatttttactccgtatgtgaattaggaatgaccccttttcagaaggacttccctacacagactgagaggtgaacataagcttaaatcctccagtcactcgccatgtgtatatgtactgggaatcggggcaatcacattatacagacttacaaccaaccaggttggaaggctgacaaatgaagcaaatgcacccccgcagtagaagtcaataagaactcggtgttttgctagtttgcctaaaaaaagtctactgtcatctaagacctgaaacaatttcttcaccatgagacccgttacagttggaattgtgtcgatcggagacatgggcctcggcatggccaggctcctaaaagcccacgattaccgagttgtcacggtcgcagaaggaagaaggtacgaacaccggaggcgaaaaccaaagccgagaaactaacggccgctgttcggccagtgaacacacactggcacggatccattcagccggcatcgagatcctcccctcggaccaagcgctagtaatccaagccgactacgtattgtcaatcgtacctccgcggaatgcagtggcgacggcgggacgaatcgcagctgcgtgcgcactgccgtcgacgggcagtctccgggaggcggtggaggacgtagagaacccgccgaaacggtccaagctatactacctcgagctcaacgcagtccccgcccgactggcgtcggagatggcggcgcaattcgacgagccaaccacaacggacgggggccgagggtgccacttcctcgatggcggaatcattggtgcgccgccgtcccaaagcacgcaagacgggagctggaagaaacctagcgtggtgctgtctggattggtggatctggcccctgggtttgcgacactagccggggtgttgaatataaggcttgtctcatctcggattggcgccgcatccacgctcaaactatccttcgcggcgctgaccaaaggtctgaccgcgttgtctatcctgtccttctccactgcgcagagggagtcgatgttgccggagttgctggcgctgctggaggaatactccccacgcactgcggcgctcgccacgaatggggtgattggcatgagtcccaaggcataccggtgggaggatgaaatgcgtgggatcggggagatgtttgatgcggaaggcggatggaatggagtcggagccgatgtttatggaggttttgctgagatctatcggaccattgcggaatataccgtattaggcgaggaaagagtggagcaccgagtgcgaggtataacgattgaggacgccgcccagatcatagctcagaggaaaggtgcttgagttgtgggagtcggcaacatatgtcatagggacgatcgaatgtttctagacgacgcgggaggggatttcgggcccggttgccaaggtgttgattaccagtccgcgtcatctgtgatgcgctgaattgaaaagtggacgaatgatgttgaatatagaatacacttacgcactctgatacgattacatactcccacactgcatgtacctggagactccatatattctactccgtacttcgcctcaggtactggttccgaggcaagtggagatatcagtcttgtttttctccagaagagcttgatatttcgaatccggagaagctggatatatatatagatttatatctgatatcgtataactatcccttctataccccgtaactaaccactgatcgatctatactccgtacatccaaagcggtgaatgtccccacgaaccacaactcgcgatcacgacatttctccattctatcagatcatcgactagcatcgtttttcctggtctttctctttgccccccccctttttttaaaccaacggccttttattcctcttctcattcgctcaggtggaactcccgcggcatgcgacgatgaagtgacctttctttttcgagatcgtgtggccgagagctcaaccttcccggtcttttttcctctggtctctgctttctttttcttttttggggccttttcgtcgatatttaattggcaattcctttttagggtgattctgatttgcttcaaaaaatatcccggatctggggtgtctctaaacatcagaaagcccctcttcttcttctcccataaccctaaaggtccaagggggctgaacttcctttttatttcttttccctcttcaaccatgccgggggaacaaccacctctaccaggcccgggtcccgtcttcgacaaacttgagaacttcaattttttgatgtcgcgtcacgatccagcagccaagacccgacagtactcatttgacgctgatactgggctggtcccgtttggcaacgcgaatatggattatgaccagaccgaaggcatgggcggtctatctgtcagttcttatgagagtatagaagacgatcgcagctctctcgatctccgaggctatccctatcatggtacgtgtcaagcttttgagacttttgttgcccaacgttgcatttgttacgccatcgcgcctctgcgtctgagctttagtttggggcttgaaattccaagtctgaaaattgaagttggatgtcttttttctttgatgattttgtccctgttggtttttttttaaagaaagaaaaaaaagtcctggataaccaggttgaaacctcttcttcccctacacaatcatgttcaccaatttcatttcgagggcttaaaaaagaaaaaaaagaaaaaaggctgcagagcccaggatgtgagctgtgacatgcatcttccatctccaatggtggaaggagatcaccgtcggtggtccttaaatgcacgagcacgcaatcccgcaatgaaatgacaacggccagttgccagcttacgctgaactgcacatccccttgagacccttcttgagcttatatccttccggaatatgatttacacttcccgatccatggggctcactccctcggggttatatcgacttcgatcgcttactccatccataggccctgccggcgagaagtccatcaactatactcttccagagcacatgatgccctactcagcccattccatttacccaccagtcccatacgcgcccgacgagctcggccacgcacagggggccctcacgccgtccgatgtgtcctcgtccatctccccgcccaacggccagatgggaaacaccaagtacagcaccaccatctccggcgatcgcatcgccgccgccctcgatcaagaggagggcgtgcgcggtgccgcagaggaagatcgccgtcgtcgaaataccgccgccagcgctcgcttccgtcagaagaagaagcagcgcgagcagatcctcgaacgcaccgtgcgtgaaaccaccgagaagaacgcttccctcgaggctcgcgtcgcacagctcgagatggagaaccgttggttgaagaacctcctcacggagaagcacgacgccggttcttctcgtctgcctgctccggctaaggatagctcgaccctcgagctaaaaggtcctggcgccaataccagacaaaaacatattcagcccaaaaagaagggcgtcggcaccgaggagtgatgatccaaaatggaagaatgtgcttttttgttgtttgtttgcgttgttgttcgccgttctttgtatcatctcctcagcctactccgtacggtctcctctacaaggcgtccgtaccaaatcagcattctgtcttgttttgtttttttttttcgtctacttgctttgctatggtgtctacactcatctaccccttcattctggcagggtagatgagcgcagacaaaatgacgacgtcacgacccttctcttcttctcgtttgcccggatctcccgaccgtggcttcttcgacttctagggatggtctttgtttttgcacttcagatctggcaactttcgtttgatatttgaatccgctatcctctctctacgctcgccttcctgccatcgggctttatctttacaactcctgcccaggctctataccttctatacatcctctcaacccttcctatcctctttccatcagatcgtgtgctgcgaaggcatgtttcatttttctctctttccccggggtttacgggaaaggagatgagttggcggtgttgtggtccagactcggggaagtcaattctagtttttgctttatatggtactggtttttttatatttgatatcttttctcttttgattgctctgggacttgctttttttcctgtttctttggtttcctccgtccttgctagctatctgtggactggaatacaatctaaatccccccggggtttatcttttgctatacgaattatctctactccggagtccgtactccgtaacaactgttcttctatcggattctgcacatacgtaatcgcaaagacgcaaaagcaatggcgggtgacgtgctccagctggcgtgctatatcagagcgattgcctcacggagatccaatgccattggagaatcggatgtgctgtgtcagttttccggggtaagggtctccccacagcctacagggctgcactattcaggcgaactgcacgaacagccacacagacagcacttttttaaattagcctagccgtacggagtatacggaggtatactggatggagtaatataaattcctgcaaacaatccattagaacacccttgattaccctggactatcctaatcctcaaaaacacaaaaaaaagaaccaaaacaagccaacataagatggtattacatcgattaagtagaaacagggaattgaaataaggaaaaaggaacaaaacaaagaaaaaaaaagactagacaattcccaatcgcacttggatctcagagtgacatctccaaactccgtggagaagggaaaggggaaattagacccacgtccgatcaaaagcttggagaggtggacttccccccgaagcacgattcatagccgttagatcacgacatttcatgtgaaaaaaaaagagaaaaggcgtcaaaacgtcccaaagctgcatgacgtgattgatgtgcgtctgcttcgagaatagcacggaatcaataaaacaaaaacatatatgaaagatcaaaagcacaagggatgggggatgggaattgatttttgacaaaaggaacgtggagatgaggaccgaccggacagacgaataaatcatcgtgtccatgcatctgccctagaaatttcagccgtcagattcgtgatggaaacaaggtaacagtctttctctcgcccatctcttatgcggcaatagactcgcggtcctcttcgcggccgcgctcctcgccctcaatggtgctcacaccatcatcggcgtcttcgtagctggggtgctggtcggctggaagccaagagtcgcgatccccggccaagggctggtcctgtgcagacaaatcgacgccctcgcggttcttgctgaggttggagcggtggcgctgggagagggtgcgggagcgctgcgagagactagacttgaccacggccttggaggagacccagttggtgagggcatcctcgcagtcctggatgatggccttggaggcatcgtagccgtcgtaggcgttgcgggtctcgccaggagtgacgggggtgtcgtcgatcaggtcgaggaggtgcttgccgtaaccagcgacgatggccaccttctcgcagtgctcgcggagcgcatcaaactggtactggaacgcggccttgaccttctcgcgggtgatgttggacagctgggcctcggcgactagggactcggcttcggcgcggacgagctcctgctccaggacgacgatgcggggcgagttggggtccttgtacttcagcttggcgatctcatcggtgatcttctgcttgcctggagatcgaatttagttaaagctgaggagttgttcaacactgctgggagagtcttacggtctcggctgggctgtacggaagcttcgatgttgcggatgctcttaatggtgacacggtactggtcgtagcggtcaacgaacatatcctctagctcaccgatctcgtagatcagcacgccgagcttgtccgtcacatccgacacatcctcatcgcatgcttcaccccaaatggagagttgttgctatggcgaccgagtcagtttccaattcgttataacgcggatcgcgaactcagggtcatcaacatacagcgacttccatgcgctcccgggcgacgagctccatgctgcgcatggcgttcttctccatcttgacgagctgcgacagcttcttggcgagctcgggtccgaaggcaccggcggcattcttacggaaagcatgacctgattgtagatgttagtttagttcagttttcgcagcgatatctcctctctctcttgcgactggtggtctccaattcggctgtcgtttctcggaggcgggggaaagtcgatagcggcccgatcttgggcagccctccaacgcgacgaacaccctcggagatttccatcgaagccaatcgcaacaatgtctcaatcgcactcaccgattccgcctttccctagccatctcccggtcttggttgtggacactggtggtagtgggctctcaatctgcgaggcggtcgggatgcgcgactggcgcatggaataggtgcgatgcatcatatggctcggagaggaaagtgaagtatgggaagatggttgtagagaggtagagatgtaagattcttgttcctgtagaaaaagaaataagaaaaaagaaagactttcccgttgcgcagtagtgacgtgagcttaaagaggggaattctttttttttcttgtacgtacttgagctggatgtgacgagaaatataaactgcaaacggacaggggaggtatagtccttttcaatgaaaactggagaaaggtgaagttctcctggaagctctcgggatgtgacgtcgactatttctgcccaaggggaatggactgatcggggacgctttgggggctcgggattggccagacgagcgcgaaaactcgacgacgctaggacaataaagagcattcactgcataaaatcagcctctgccaactccttccagctattaatcggccgatcgcatcgcgttgcaaatttttccatttttttcaagtcttcacgatcacccgacgtcattgacttccaccctgatgtcatggagttatgaaaaggttgcattatatacgctgatactgctatatgctacaatccgacagtagctacaagtgcctggattcccttttcacggctttgagatcgaggaactgaaactgcatactgtatagagctataccattggtgccccagttccactcgctgatcgcggagatcgtggaacgcctgttcgtggggaaaacccatgtggtctcggattttaattccacccggggcacggttgtaccttgcaagagtaactgatgataatgacagaggtttgattcatagagctatggaagttgagaactcatgagacatcggttagaaatggcttttggcttgaagggacgcagtcactaatcggccaaggcgttcattcaagcagctttgcccggtcatctcctgatggtgaaggtttctcggttcttgacttttctgaggaaaattgtttcatcgtagtgtccctgcgagagatagaatctgagtactacgggatgaaacgtaggtggtctggaaagtctcttgagttgcgtaagaaggaaaaggaaactatccaagtgctgggagagcggagaggtcatgtgatctcgagcagcccgtaactataaatattagtacattggtaagtcgtgaggatagtgtgtatcataccaagtggtcgacaaaatgagccctcatttccagcttcaaaaagctgcactcgagctagtgacagcacatcccatatcaagaaacgaacgatagtacggaaatttccgattatacgttcatgttgtcgacttatcaagtaaagggagaccgtaccgaattgtcttataggtacaatccatggatatgacccatgggttcatctcgagcatttgaacgcttgacttatgcgtgcagaataacgcagacacacgctgaagcgctgccggagccatggcgtatttgcttctcgatgaatgcaagatcagcactatgataaacgaccacgcgatatcactgatcggccaagggattcggcctttggacaccggtctcatctccaactaattggagaccgagtttccttcttttttctgcgtcataacctgggaccacttccttagagatttggtgagtgatcgcggatatcaaaaacccgaagagaagcatatctgcactctcgaagatgttaagatccgtggccaacaagcaaatactcgaaacagttcagattatataaccagcggcatttgtattagctctgtggcgagagagtgtaggttaggagaggtatttgaggcgcatggttgtgggactaagacgaagactatcagtgagtgtgttttcaagctagtcgtatctgatcgtcatattctcaccttgaatgtcattaaatagatggagaagatatggtatagagaggtagaggttgtgtggagacgtggtagaagagaaagaagagtgaggggcaaggaagagcattttatattggttaggtgaacacgcttctcatgtattggatcacttccagctctatcgcaaaccgagaagtcaagctacccttcgtttgcttaaatataatatatatgcatcctgattcatcggtatcgagaaagacataagctggataacaagacttagatgctaacgaaacaagaagggatcaacagaagatagttgctatgatgatataattattatgaagctccctaaatagcttcatggagagacaaaggcctaaaagccacaaagggtcacagtttgtcaacctgcgggcaggaagacaggaaaagccccaatgcatcagtaggcatttctaaccttcgtgaactacccgtcgaagaggctattaccgttgggcgttggtcctcccaagacgaccagaccatatagaatgcagtgatattctgctatagtaactcttattatgaaaaaaatgagattgacaatcttatggaacaagctaaaaaaaaggtatagacactttagtcatcatatttcacaagtttcttggattcaggcgccactcgaatgagctttttgttgatgaattctccaattcccaattcagacaactccctgccaaagccggagttcttgacacctccaaatggtaactcgggaactgtcacaaagaatgaattgatgaaaaccatgcccgcctcaatcttatttgccacggcgcgagcatgttcgtgattctcgctaataacagacgaaccaaggccgaacttagttgcgttggccagttcgatggcagcatcatctgtatctaccgagaacaccatggagactggaccgaataattcctcataaaaaatggggttctccggagtgacgtctgtgatcatcgtagactcgatatagaagcccggccggtcaatacgattacccccaaagagtaccgtggctccatggcttttggctttatctatctgatccaaaagcaccttcatagcactttccgaggacagcggagagacagcagtgtgaggatccatagggtcaccggccacccgagagctgaaccgatgtctcatgccttcgataaagcgctctgtacgctccttgccaaccacgataaagcgcttgggcgcggagcagacttggccaagacaccagatacgtccagcgcaggcctccgcgattgcgaaatctaaatccgcatcctcgagcacgataaacgggtccgacccgcctaactcaaggatgacctttttcaggtttcgtccagcacattcggcgacgatcgaacccgcgcgctcgctgccggtaagtgttacaccacgcacgcggaagtcgtcgatgatcgtttcaatctgtgatctggtgcaaaagagattcgtccacgcgccctcaggcgcaccggcatcctcgaagagctgagaaaatgcgagcgcgcattgcggcacgcgtgccgcatgtttcagcaacaccacgtttccagccatcaattggggccccgcaacacgtgccaattgataatatgggaagttccatggctcgatggcgagaatgatgccgaacggttcgcaaatgacttcagaactagctccgtgctcgtgaatcgtggtacctttcaagaactcctcggcgttcgttgcataatatgtcaagatatcgaccgagagtgagacctcggctaaggcttgggtgtataatttacccatctccttggtgatgagtgtggccatgtgctctgatcggtcactcatgagccgcgcaacacggtgaagaacctccgacctttcagcgatagtacgccgtcgccaatcgtcggtgaagcattcttgtgctctatccagtgcattggacacctcctggtcggtagtatccttatacgattggaacagttcaccggttgccgggttgatggatttgtaatgggctggcttggacattgtcgaatactgatgaaacgttcaatgttgaggacagtataagatgataaaatgagtttctcgacagttcttcctccggatatttataccgcaacacagctgtcactcgatatagttatgaccggattagggccatcccgcgagtggatagagtttcatcattaaaacgtcagccattcatataacgtcattgactacgataacagagcttagctcatgagaagtaaacatcgcccggacagaattcggcgttctatcggattgttttacagtttgcactaatgtgtggttttaagctagtcgtattagatcatcatgatttcaagacatggcataaagatctagaagttgtgtagagacgtggtagaagagttaggagcaaacaaagcattttatactggtcaggcgaactcatggtctttaccagagccagccaggagggataccaaatgccatgataatagtgatggaagaaagctggtcttttaacactttgcagcagggacgtaatctatattaatagttccggtggtagtattgcttactcacattgtctccaaattacatatgtatgtcttcatacacgatttctgtacgtagattgaaggtaaatggtggagacgaatacctgtaattgggcaaatcgaaagatgctgccataaggatggcgccgatgatacagccgaagttggttatgaaagccaccttacgtcggctctagagatcaccaaggtagatagatatatgaatgcggaacaaagtgaagcaattaaatcataagcctcgtgtgtgtttaacgtgagggtcttttcttatggacccaaaatccagaggttctaatgcggtaaaaatggacggtgagatgtggcagaatgacccagccggcagaacacatatgcactaggcccaatctagctagatgatcgtgatccacgtgactgactttctatctcacacccaaacaaagcaaataggcaagccaataagccaataagagagcggctttgtgtagccttagaacttagaaccagtcgcttcgctctgcaacgactatctggaggccttagaccaccgagatcactagtatgattggcttaggggcagggctatccgtaagtgcgttgtggcgtggttttgcttttgccaggtcgatccaactactatcgagcttccctctccaggacgtagctacattacaacatttaaggttaaagcaatatattccttccaataaccgagaatgacgaggtggcaagtctaaatatcaaccaacttccggtagcggacatatgttgccgtgcgggaatctccgagtcctgagctcaatccgaggtggcgtgacgggtctttcgcttcttattcgtgccggccttgcctttagtagttgagccacctcttttgcctttactttgcgaaataggggcttctttctctccgtccttgttagctggctcgccatcccgcgaggtttcgcccgtctgagcttcctgacgtagtcgactaaatgccttttccatgcggctgggtccacctgtacgaacgcgaggcgcaaatgcacccgcgccctgaggaccttgcatgaaatgcgtgatattagactgtgttccttcctgttctcgccggttcatgtcgcgaataaccggcaccaggacttcatccgtacgctcttggctccagccaattgtcgtcatgaggaaggttcgtaacgcattcaaatcaggaacaccccattggaactgggaagggtcgtcgtcaaccgcgggttccaggtatgcctcgtcaactttagcatcagggaatgaaggaggtaagaatatcttggatgccttctttcgaaatttcttccggaaggcaaggtgggcgtcttctgcattattcgtacccatttgcaattcggtccaccattcgcggaactcttcgagactggaaaactcggtgagtatctctagggctgtgacaggaccaatcccgggaatgccctctgtgtagtcactgcccaagagatgggcgaagctaataagcttccgtcgatggagggcgtactctttctccaagtcagacgtcaagtagcactcaacgaatttactttgattgaacatgtttttgtagactcgcgttcccccgaaaaggaagatatcactgtcatccgtgacaatcccgtccacaaggcctagcgagactaatttggcgcactgcgcttcagcttccataggcgcggtaatatagggcaatccgaagagcgtcaagagctgttgacactcattgatcataatagtagtcacctcgtctgcatcgcgacgctcattcctctgctgagaccgtagttgcttcaattcttgctcgtagtcaaaggcctcctggctaggagcagcagaattaagagtattggcaaatcgaacgtgctcctcaccctcagccgcaagctgcttgaacagctcttcatcttccgggtcactatagtcggcttggtcctgcacaaagtcttcaacctcttcgaagaactgaggctggggctgggccttttgatgggatacaacagtgatctcggggccttgggtgggcagctgagggacaacatcttcgaattctggtgagggagatttttcgctgcgtgaggacagctcttcaaccgcgggaacttgatcctggatttgtgtttcagggcgtccaagtgccgtttcatcgagatttctattgacctgcgctggagctggttcgctcaatggcttctcatggagatttgtaggaagctcattgtaaatcttttcaatgtcctccatctggaagatctgtttggaattctccttctcctcttccgcctcctcctcctccctcttctctagatcaacgacttctgtagtagcggaaatttcgtcaacatcgattatgtccggcgagcgacgattggagaggaacatatgatctggcaccgcagatcgctcatcatccttttcaggatcttcaatgggatcaacgatgaatcccacatctgagcgttcgccaacaaaccaaggaggaagtgggtcaggttgttttggtttctctgtaggtccctttaggaagccccccgcattttcaccaacctcgccagctttatcattatctttcgtgactttagtgagtttgatagattcaaaagggagaggaccaccgaatcgagttggcgcatgtgaggcttttttcgagacctttgttcttgctatggctgcagcaaagtccattccatcatcgctctcggaatcaagatctggcaccgtctcatagggtggagctgattctaccggtcgattgatgggcatatcaggcatatcttcgtcgtcgactttatctggttgtaatgaaagggcaatagcccgttcaaggtcatcgtcatcgccatcgccattaaagaattcatcagtgtcgttgttctgctgctgtgcggcaatatttccctcagcttcaacaaaaagcgagtcatcttcaacctcttgtacacggcggtcgttcaccgactgttgctgtgcagcatgacgcgattcttgtatagcccttctcatgtctaaaacctcattcgtttgaagttggagcgaccggtccaatacaccctcttggaggaaaggaagtttgggaagtcgattcagaccttcgattggaacatcctcgaactcatcttcgtccgatacctcatcctcatcggacagtatctcaggtcgatctagatcgatgggcttctcttcgtgaccttccctgtttcccacaacacctagtacccagccaccttcatgttcgctatccttgacaagcacatattccctgccacgttctcccgcaacgcgcttcccagagttatagaatgcttcgtctccgttcatgccgtttatattcattaatcgttgcgtaaggtcattacgttctgcgacacgctcgatttgaaacctcgagaatgccatgcggtcgggaaacatggtatctagctgctcttttgaataacccattcgaagtcggcttcttagcctcgctgcattcaagatgttgtagcgatcagtggcgggcagactaaggaaaaacaagctgtcgaagtcgattttggaaaaatcgtaaaggttgatatcttgaccctggtggaaatgtctagcatactcctccagttcttcctgggacataatgcgtggatcatttggcgctcccatatcttgaagagagacgtctaggttaggtaggtggtacgcatccttcttcttgaacctgcgattttgttgcttttccgtttctgtcataaaagcctcctctgcgtagaccggagcatctggcacttcttcttcctcttggatatgggtcttattgcgtcgacgagcgttctcctcctccgcactgcgttgcatttgtacggcaagcaactttcccgcggtcctcgcagcatcttccctgtgaccctcgcgtttcttctttcggccagcgattgtctgccttttcatgaccggggccccgccatcgaagacgaagacaggccggatcccgaaatacagcaacttacatatgcgacgaaagaatccgacgatgtgagaatttcgtagcgcattgccttctttgtctcgtaccgccttcagaaattgatagatccagatcgacgcgtcgacagctagtcgttttttgttcagtgtttcgagtttgatagggcgagcgcagggctgcacgaccgtccagaggccggtgacacccatggctagtcaaaggggtattgaatcatgggtgtgtattggggaggtctggcacttaagacaaaatccacatgtagtgagagagctgctcccaggtggttgattagcgatagaggctctgccgagaagtcgtcattccgctcccgcgctcgatcgcgagatcacgtgcgtaatcttgcctcttatggattagcgtttgaattatataagcatgccggggaaaccatcgaaaaagtagttggtgggctttttttggcgtttggtgggatacacttttatctgaggcaattgagacaatccgggtaatcgcttctctgattaatgtgcgtagaagttggcgatgtctttttcgctcgaggtcagtgttgttatactgtagtcaaatgctgtcccgctgactcaagatgcagcatattgatgcttttctcccgataacagcgttgaagacgtttgtattgggtgatagacgatttatctttcaaagtcaaggcacattcttccgggtggttgatgaaatcaccggtattgtcgctgctcaaatccaaatattcaaaagaaacaatattcatggtttcattcctttgaatcaacgaccacaggatcaagattcgaaccatgtccaaataatcgtctggggtggtcgctcagtgcgagcggttgacctcgttttgacctctgatcatgaagtcacgttgtcggcctctagtgccgagttcattgctccagattggatcatgagtgggtgcgcagctgttaccggtggccatcacggggctttttttatcaccgcgaataatgccctcctgagtctcgaagtgctcgacagcgggatgcctgggcgaaatataatatccatatatcaactggcgacaagtgtaaagtccatcctttactccgccgatgtgattgcactgtcttcctctcatgtcctcattgccgctggtaccgtcttcggagaaatcattgtgtggtcgtgtttcttgaataaaaatggattacacaaagctaatgcagttggctctatccaccatttcttcacgggtcatgacggatcaatattcggtgtccgcatctctcctcagatcccgtccttgaatggaggcaagtctggcaggatactcgccagctgcagtgatgatagaactgtgaggatctgggatatatcagattgtgaccacaagacagcccaagatccttccgcatactccacagacgggtttgaattgcgaagcacaggttttggtcctgttgaggcaggcgaggagagcgttggatctgaatcatgtgtggtccaggcctttgctcatgcggctcgtatttggagtgtttatttcagggccatcaaacataataaccaaactcatatgggattggtttctcgtggagaggattgcacatgcgttctgtgggacctaagctggcactcatcatccgctgagacgaatgactatcagctcagccagactacttcaatacaaacacatattggaaagcacatttggtctctagatctttgcagaattggctctgagactgtggtttataccggaggcgccgatggtgcactgaaaagcttccccatcaaagaaaacgacgacgaacatctgggcaatggctctggtgtttcttcccagcaattacctagcttgcaagtaaaggcgaagaacaagcatcccacagccgatggaacgaaagccttcgcatttgtcgcccaagactgccttcttcgcacctctacacaaggtcagatccaacttggatatcttacccaggcggaggagactgccattacttgggagacactatgcgaagcacctgaccttgcttcttttggcgtcatggctgctttaccccagataggtctagcattgatcggtaatttccgaggattcattcggctctataatcacgctacgaaatctgtcatcagcatcacggacgttggtaacagaccccttggaatattcttccttcagactcactcttccaaaatggatatgttgaatttctctcaaaacattgcattccttgtcttttaccctaccggagaagaaataacagttgtcaacgtctcagactggaacagcgatcatccaaatgccgaaataaccacctatagcctaccatcctcatttgtggtttgcagtgcggcttttatcttcgatggccaatatttgattataggatcaaaattcggcgcccttgcaatatacaacacctccgaggccgagcccgtattggtcaaccgtcgtgttcatggccgagagtttgtgaatcacatcagcgtcgtgacatccgttactacgagtgatatcacaaaatcagacttcgtcttgacctgtgggcgagatggaacttattgtctccatgaattgcagctttccgggaatggaaaaaatgttgtaacgatagagacagtgcaccgtacagcatctatcaccggtgggaatattgaaggtgcctacttcgataaaacaaccggcgatttcatgttgtacggattcagatctcaagatttcgtcctgcgcaacgagtcaaagctgacggatatcgtatccattgcttcgggcggctttcgccgaggctgggactttatgccaggagacaaagataacaatgcgctgttcacgtggaaggacggaacttctttgatgactactcgtgtacgagctggtgctagtactttgcttcgagccggaggtcacggacgggaaatcaaagcgatggatgtcttcaaccccaccgatggagatcggtctctttttgcgactggcgcagaggacactactgttcgtatttttacgccgacttcctcattggctgctagtccatggggtagctttgagtgtctgcgcgtcttggatacacacaagtctggcatccagcaggtgacctggtccaaggatggaagatacctattcactagtgctgcatacgaggagtttttcgtgtggagagttcgcaccattcctatattcggcgtttctacgaaattggtggctgcgagtccgaaggacgacccgaactcagatctccggatacctagtttcgatttgctggaagtagaggatgttgacggggagcaaggtttcctcctgtgccttgctctttccaactccattttcaaggtaagggtagttctttttttcaaatattacggccatactaacgtcattgcagatcttccacttttcaccatctaatgggggcaaatttactctcttggctcgtgggaaatacatgaccaactgtttgacacaagcccacttcttggtcacgagctcctccgtgagccttatcaccgctgcgactgatggctacttcacactatgggatctaacaagcacacttgaaccattttacactatcacacaatccattttgaaggccaagcaccccttcgaaggctcctccatctcaccggaaaatatcaaatgcgaaagtcggtatcagatccattccaacagtatcaaggggatggagctggttcctatctctgacacggccactgtcattgtggctggaggtgatgataactctctctccgtgtctctcctacgaacaaatccatccgacaccggcacaaatgcacaggtagctacggtttctatcccagatgcccacgctgcagcagttaccacagtcaaagttctcaaccagcaaatctctcgtgatattacatcaaatacagacaccattcaaatcactgtggcatcttctggcaacgatcaccgaatcaagatatggtcaatcgccgtggaccctacacagcctgacacgaaagggattatcgtgagattcttactggatacatatagctctgtggctgatatatcatcaatggggcttgtccgtgggcctatgaatggcctcttcacagagaaccatgcgtttagtcagttgcgattggttatctgcggtgtgggcatggagatgttcgctgccgaatcggatcgagtcctatctgcatgatgccgatttgatgttgaatatagataagatttcaatgtgacaatatgaacatagacgataccatgtgagattacagactcattgagagggatggcgatagcaaatcaaccgggcaagaggaaaactctagcgaactactcgggtaaccaataagcagattagggcatgcattctagctacaggacaaacctatattcaatattcagcggagccatacgattggacaacatagtgtcttcgtgaattcgtcaaaccacccagctcctcttaaaaaatgaaagcttgactattccaatactaatccatatataccgtgcagtttcggagagttcgccgtattttgcaccaatatggatgaggcggaacgaaccccttttgaggaaatgattcccaaaaggatttaatcaaagggtattgttataggcactccaattaaatggtttcaattatttgtctccgctctagactaagacgaaaacagcatttcctaagacgggatgactatataaggaaagaactatggacgtgtgaatattttctttacaacagactacaataggcatctattccacatcatgaagcatttcattactatgatcgccgtcgctgggctggctgctgctgctcccttgcaatctcgcgatacgaacagttatttcttcacattgtaagtgataaactgcgtcctttattcatcgccggttgggaaaggagctaagagcacccgcagtggggattcctacaccatgaccagtttcgatatcgatggcacgcagccaactgctagcaatccaatggggaatccagcactgggtaggttttgttcgcccatctggcaagcaggcttgactgattaaagacaataggtaccggaacaaccaccggcggtgtcaactgggtgggatacctgactaccgtgaacaatgcctcactagtccttagttataacctcgctgttgggggagcatctctcgataattcccttgtgaataccaacgtcgaagatatggtaacgcaagtcgccagcttcgagacaacatatagtcagaagcctgatattgcaccgtggacttcagacaacgcaatttttggattctggattggaattaatgagtacggtcccctggattcccgctaacagctaactaactccaatttacagcattggttgggcttggtcaagcaacgatgccagtgttctgattccaaagatcatggcccagtataagactcaagctgaaaatatctacgcaaatggaggacggaagttcatcttcctcaatgtcccgcctacaagccgatctccccaaatcgccgatcaagggacaaccgttgcagccggccacgctaagtggctcgcggctttcaacactgcccttcaaacaatggtcaatgaattcattgaagataacagtggcgtatgttcaagctgattatatacttttgcacaattaacctggctgcagactacaaccgttttctacaatacattcaccttcatgagcaaggtcctcgacgcccctacaacatatggattcaccaatgctagttgtgtcagtgacgatggtgctacctgtgtctggtggaattcctaccacccaggttatgcttaccacaagctgcaggcagcggatatgaaagagcacatgcactctttcggtgcttggtagactcttttggatgatctaggaaggattgtatgtcggactaagactggtaaggttcaaagctcaataaatatgtattcctgtctctttgcgagtgaatatcgatatttttgaccgcgatggttcctgttcagcttgcaatcaacttgccacgcttacttgactcacacatttggttttcttatgttcaaaacgaatgtattcttagttaataaatatggattattcacgcatattacactccactaccccctgcatgtcaggaatcatagttaaatgccgatcgatactggaagcaccacgggcttgaaagccacctgtgtctgaagaactatttcttggggattggagcggggtatgtacgatggatgtacagtgataattcttcttggttgaacatggatcaggcttcttctagtctaaagactcggggacattgccttcttggctatccgtttcgcatgaggtcgccaagaaggacttttctcagcatgacccatgatgttgtggatcctcattggcattgaagtattattaggcactgtaatatccgaagctgtttcacggggctactgcacggagtacagacaccactttagtatcagggactgaaaatccatgaaactccgtgtccttttctgtcatcgatttccaattttcatatggttgtacttattgggatatcctgcaggctattcgacgatatacattaatttagcaataggaaacacctgagatatccaagttgatccctgctgttggtgtcatttcgcattctctcacatcactcctcttcttttctggacttaaccattcatcccatacagcaaagagcttgactcggcaatatgagactcggtcaaattgccttcctcgccgttgtggctggacccgcagcagcagttcctacaaagaaccatgcaaagagagcttcgccctttcaatgtgcgagtccatgagttccaaagatatttctgacaatccattgaccaaatttctcgtatagggttcggaacaagcgagtccggagctgagtttggcgaggaccaaattcctggcgtctatgtgagttggccaaacatgtcttcggagaagctccactgataaaaatcggaatagggaaccgattatatcttcccggatgctagcaccattcaaattttgactggaaaaggaatgaacatcttccgggtggacttcctgatggaacggctggtaccggactccatgacaggcgggtttgacgatgcctaccttagcaatctgaccacggtatgttgtgccgtatctatccctaagggaacaagcgcatactgatctagtagcagacggtcaaagccatcaccgatgcaggatcccacgccgttcttgatccgcacaactatggaagattgtaaatattccatcgaaccaacgaatgaatcgaagctgatgagtgtacatagcaacggcgagatcatttcgagcacatccgactttcagacattctggaagaacgtcgcaggcgaattcgcttctaatgagctggtcattttcgacacaagttagtaccccagatcttgagtcgtatcacaaaaagtctgttaaccgcatcatgcatagacaacgagtaccacgacatggaccaagacctcgtcctacagctcaaccaggcagccattgacggcatccgcgaagcaggagcaacaagccaatatatcttcgtcgagggcaactcttggaccggcgcgtggacctgggtcgacgtgaacgataacctgaaggacctgaccgacccccaagacaagattgtctatgagatgcaccagtacctcgactcggacgggtcaggcacgagcgagatatgtgtttcgacgacgatcggagaagagcgtgtgacggacgcgacacagtggctgaaggataacggtaaggttggggttttaggcgagtttgccggtggtgtgaatgatgattgcaaggcggcgatcacaggcatgcttgattacctgggtgacaactcggatgtgtggctcggggcattgtggtgggctgccggaccttggtggggtgattatatctttagtatggaacctaccactggggcagcgtacacaggcatgttgtcgacgcttgagccatatctggagtaaaatctctggattgaggcaaatgcgaacatacacacatagtccatatgcagcatgtgagttatcgagttcggttgctgtaatatgcgaaagaaagaaagaaagcaactgcttttcgaaatgaacgtatctttttcttaaagtattagagaaaaagactcaaatttccgatggccatagcttatgtatcagatgtcttgtcgggcagcgcaaaaatgggtaggtttgtcagagcgggggggttcccaaattcagagaagtttatctggaaatcataaatatagaacaaggcatcaccattagtggaatttgccctgtgcagagacagcggagtgcgagtggaatggtatacaacataggacaggaaggtggggatacggagataatgccaagagagaaatagaggagcctggcatctatcccgtacatacggtactccatacccaggcttacgcagtcttgaggcggagagggaaaaatttgaaatgatccacaaggctgatcagagtcgaaagggtgacgaggctcggattggggaattgcctgttttggccacttggaatgaagatcctggggcggtcagaactagatatgacgaagtttgatagattggatctcgtgtgtacctacactgtctacgttttatttaggggtatttccgacagtgtaatctgcctacactatttagaaaaatataatctttacggatcaaaagcatatccaaaatatagttcttccatctgatctgactgtgtcgactgtggatgtagggataagcagatgaaggaccattccgctagacctaaataggactagtcaagcccagaaatagaagcaaacgtggccctggcgacgtgaccgctcagccctgattggcccgctgatcctgcgcctccttccctgggaggctggagtttctgtttagtgtgaggctgtgcgttcccagggttgaacgttgtttacgaggtctattgggggcggaggggcatttatattaaagtcttccctccatctcacctctccacttctcatccatctttcacctctttctctatattcccatcttccataaatacatcttcatcatgggaaaagctggtcgtgtcgcgtgtatcttcacgccctatgtcttgaccatcgcatcattgatctgcatcattttggtgggattgggctgcacaaaagccagttcttcgaccttgaataatctatacttcattcgtgtaagtgatcaaagattctacatggttactgcatccgctaatgccaataatctatagctcgacctctcgaacataagtgaaggatcggcacttacatcagaaatcacagatcgcctcagtgctgccggtatcactgatgtcactgcggatgaggtctcggagaccatcgaaacactgcaggctgatgccaatatttctgatttctacgacatcggtctctggggttactgcgagggaaatatcaccaacagcacggataccgtctccagctgcacagaccccaaggccgagttctacttcaacccgtctacaatcctaggagtgagcgagaccgagcttgagaaggagattggcagcgacctgaagaagaccatgaaaatttacaaggctgtctccaagtggatgttcattgcctacctagtcgcgtttattgccacttgcgcccaggtcctgcttggtatcttcgccatcttcagccgctggggcagctgcgtcaccacgattgtctcgattgtttcgttcctcttcacccttggcgcatcgcttacctcgactatcatgttctcgatcgcaaaaagctccctcggcacagtcctcgaggtctatggtatcgatgtaagcctgggtaagaacatatacgccgccacctggctcgcagtcgctttctctctgggagccaccttcttctggatgctcagcacctgctgttgctccggccgctcgccctacggccacagggaccgcagcccccgcggcatcaccgcagagaaggccccctacacttatgagcccatcggtgccgcccacccacccttcggttctcagcagccccttgttccccaacacggctacagcacctcttaccctgctgccacccacaacaacgatatccccatgacccacaacaaccagcagtcaagcgcctacgagccattccgccatgcttaaaagattgggctttcaatgactgtgcaccccttctgaagcgattttagattggcgataccaaggcgttctcgtgtttgttatttttttttttttgcatgcttttaatgtccatgtccttttcctgattcttgatgatcatcacgccattttgcatagcgagactacggtctctatgggagggaacatctgcatttttgtatatatttttatgatcctttacgaaggaatcattagtatctatttgcctgcaaattgtttcaactacaaaatccacttccaaataacatctggcttaatccctctaactttgtagaaccacttaaatgcctgatttgaccaatcacaaacagcttacaatcagaaatttcggagtccccaatcctactcgtattgacctagtttgtatgtatatacattgcagcatggaaatagctcctctagctcatgaggctcatttctttgtgggtccaaatatacatagctccaacaccatcgtgaaataagacagacagtgacccttgcgagggaggtggagagcgttaggggggcaaagctaggatctgcagcgaggctcgagccctgttttactattagtactgccgatctctacttcgctatttgcacccgtggaccgatgtttgatgctgtcagaggcgttgagttgggccccacggggaatttggcataagaatccgattgggggagttgtctgacttttcactttacatatgaaacatgcgcaagattactattccgtgaattgtcgggcttagtacgcagtactccctatggaatacaatataggtattatcactagtattacggagtaggaaagggggtttcagggcttaggtcttctggttcaatattcagagtagataaatgataacgtacaaaaaaaaataaaattatataagacggtataccatctcatattatgcttccttctgcttgaataaggatgaaacgaaatggtatttgttgttatgcttgccgttgcgctgagccagccgctggcccgtggaaaatggagatacttggtgaatattataatattcaggggccagggttcttgtcttgatctcggttgtaggtggggtaacgaatgacacccttctcatcggttagaaccctaactccaccgcgacggttgagttcctgaagaacgttctggtcttggcgagcccagcgcttgaacggtgtgtcggggtcatcggaccacacaggacctttgggccatatgttccgaagagaccggaaccagggtcttcgtcgccttggctgctcgggctcggaattattgagagcgcccagggccgcaggcggggcgggcggagcgggagagacagagatgcggcgatcgtcagtgtcatcgccgagttcaatactggcagtctcatggtgagtaccatctccttcctgtgtctcctcgatttcgtccatgtcggcttcggccatgtcaacgtcgttcggatcaggcgcgaagcgaacgctctctgcgtcggatcgcgttgcatcggttgtctcttcgtcatgactgaagaacacaggcttttgatcgtcgctgctggtgatattttgggagccaatttgtccattgaaagaatcatctgcttcaattttcacaaccactgaatccgagccggtgctaggataggaggatgacgatgactgcgttgctgttggcatgcagacatccggaacaggagcatcaccaaaggactgagcatggaggtttgagaatcttcccacaagactggccgtgaaagaattattggccacttcgctttgtatcgctttatcctgggttacatcgccttggattgtcacttcatttggaaccggcgaatttcttaactcggtactggtaggcggaacaaactgagaggcgactatgtcaattccgtgggctgttaggcttctctttttgtggtgagggcgtgagaatctcgagcaaaaaaaatcttcgtaatttagtgtcttcgaattttcaaatatatgctctgtaagatagcgcgagtactcctccaggtattggatgacaaagtcatcccataggaacgatcgttggagttggcccttttgtcgtactgcctgcaatttcgaacacatctcagtgaagtgagcaaaaccaccagcgtacggcgaataatcattgcagaatttttcatagactgtctgtgcttcggcgtactcgtcagaattgccgatagagccttgtcgccgtgctaccaactcgacatttggaccgtgagccgccttttggccagtatcaacaccctcgcagcccggagggcgtgaatatttagggcgtttagatggggactctccgtgggcagcgaccgaggtggtgaattccataggcgacaattccggcaactgcgatcctccgtcgagtcctcccggagaatgttggcttagttcatgaagttgagacgtggacagcgagtgagacccgacatcaggaaaagatgatgggttgtctgagggatctaaacggaagatagacgacccacggtgtcgttgaacaggtctcgatgaatcaagtacgtctggggacgactgaactgtagcctgtgagagtgcatgtacgctgcttgtttgagtctgagtacccagcacatccattagcggtggttcgtcttgggataaatcactgtgcccgtggttatcttgcgagcggtaggtattcggaattcgggacgagggggatgtcttagtagcttcagagtatggctgctgagagctcgggagctgaaccccagttctctgttcgctttgtttcccgggatttagacgtgtattattggctgcaggtgtctccaccacttggatagtcccccctgcaaatcttggaagcgacggtcccgagctagtaggttcctgctcaggctggctgcttaacggaaggcttccacccagagcgaaaggaacatatgtttccatctctggctcatcgctctcatcgctgcttgattcatcacgcatttcagatctaagtgggatagttttggcgggtgattggtcatgctcttgtgttatgcttgggggttggtcattgaccacatcgaccgactttgaagcgttgtgctcttggggtaggtcaggatcatggtccaaaggcaatggacttctgggttttgttgttacttcctcgggagatggagaacattgttgctctgctgttctagtatcgtttcttgatgagacaatatcccccggtcctggctgaggagcactgcaagacccgttcaccatgtctacatccccattttttatagactgatcaacgctatattgagtgccagttggcggagaagctcctctgataggccgtatgtatcttgggggagaagcggtgtcccgtggaagaacatctcgagcaggggccctatcgggggacggagaccatggtatgggagatgtagagggctcttgcggtgtagaggtaagcgcacgttcagatagtcgctcttctgcttctgcttcttctgccaaatgttgtcttcttcgtgcaatattgttccactgcgtcaaaagacgaggcggtacatggcatagaggtgtagatataccggggtcctgagggatccatttgagcccttccaaaagttctgcttggtcttttggaatatgaacttcgctcagaggtattttcatcattccatcccatggacttgttgcggacgggcacccgatgtctgtcttggtgtttacgatctgtaccctaggaggcgattgcatgagcttgttttgtactcgctcggatttatttggcggaatcacctcaccagcatcaatgcgctgtcgctttttggagggtggtgtatttgaactttgccggccctgcgagctcaggccatcattgtgaattagcacatctgtactaccacgatgtcttttttttgacggctgaatgtcccccattccaacattgcgagccgggccatgatcatccgactcattgggaggttgtgtgcccgtacactccgctataaagtctaccacttctttttcaatatctgcgtaagattgattggtaacatattcactagagcgcgtcgaattagcaatgttgctatcaagtctccgaaacgagggttctatttcggtgaaaggtctgccaatttctggtgccactgacattcctgtatttggcaagggagaatgcctgctttcactttcaccaagaggtagtccgtgggcctcgagcacctctctagtggctgcgtaatttgtttgaattggatgagaaggagcgagcaatcctagaagatctgatgacccgttgagggaaacacgactggtcattgcattactcttcggtgcgccatggcgcatattagacgggggttgggagaagagcaactgtgatgccatattggtttgagaatgattgagcggcatagttcgatcacgctgagaagcaaatgggtcggtcaatctagcatttgtttgatcgttggagctagcatgccctcgcgtcttttggattttgtcgcatgccatagtcatcagggctctaagagccgttgttttcttgagctttggtttcggtacatcccctctcggaaccgcattcgggtggatagtaaaccgtttaatttggaggcagacatccggggcaggtgctgagtacgttaaaatgagcttgatgtcgaaaagttcaactaggtgcctagggcctcctttaagcgacggtggacagggtgatgttgctccctgtacgtccggcgagtcttgtaaaataatcgcatcaatctggttctttgaatctgtaaatgtggcgcaatgactcttctctccttctccccactaacagacgaaagacatatagttagcaacaactctttcctttttttcgcattcgctcggggtattttaccgatacaacaacggctgtcttgagtgtcggcttgcagaaactgaagctgagacatccgtcgatatcttccacctggacttcatcttgatcattttgaccgatataaaatgagagacattggtcggccaaagccgcgatccagggacttactggattcatcgtgcgaatccagccttgtagtcaatgttgtacacagcatatatgtcatagctggtaagagtagacagtgggcatgggatgtttgtagccccggagtttgtagaaaaagagcgaaggtcgtcaaaaaaacccaccactcaaccgcgtcttatcgattgtgacctgccaagacccccccccggggggcggggcgcgccccgcctnnnnnnnnnnnnnnnnnnnnnnnnnnnnnnnnnnnnnnnnnnnnnnnnnnnnnnnnnnnnnnnnnnnnnnnnnnnnnnnnnnnnnnnnnnnnnnnnnnnnnnnnnnnnnnnnnnnnnnnnnnnnnnnnnnnnnnnnnnnnnnnnnnnnnnnnnnnnnnnnnnnnnnnnnnnnnnnnnnnnnnnnnnnnnnnnctcgggaggtcgggacgcgcctagcttactcagcaccaacacgtcattcaacgtgcggagggcaaagggacctattctttttttctttttttgaaagaagtttctttgatccgatcagtctgacagacgctcttatcgaccctcgatactcttttttctgccaaactcgctaaactcgccaaacctgagaccttcccgcagttctgcccgaatggtcggctataaaggtgcctagatcctgtgcggagatgatctgagacctttctgcctaacttggcgatggattctcagcactcccaggactcacaaagtccatcggcgtcttccaattcgcttcctcttgagcgacgcggatcacgcagctctatggccacgactcagaccgagcgagaatcgatgaatgcagctctggataactaccataatgcagcgtatcagtccgagtccctcactctcttcaacgattttactagtccgccagccccggctgccatatcggatgagaaaagactgtctgacgaattacaaggtggactaagcggtctgtatagtcgctttaggacttccgtcggaggggtgagggatattgtcagcggtggcggaaaaactgcagacaaaaatccgacagagactcctgcagtcaaaagtcttgtttcggagaattcgctggcaaacccagtctcggacgtggctacaagctccgctgattatctgccatcacagcccaactcgtcacaaggatcaaggctacactcgcctgttgtgccagacttccacacttatcaagaacctgtgcaacaagcaaatataggaaagagatcaagaatatcctcgaaaaatggcagcatatcttccaaggcctccgtgtcaccatcccttggaatcaagcccagtatcgcaccgttaacgaaagccaccggtagcgccattgtggcagaccctgcagtcactcaacttcatgtgaacgtagtcgggaaagctgactgctcaagaagcagctccattaatggtcccttccagggaatccataatgcaggatcgacaagtatcggtagcaaggaaggctctatggatcttcccatgagtcaaacatcctcttcattgagtcagaacctttctaattcaccagttttgtctgcaaagatgcatgaaagccatcatgaggaattcaacctcacagactcagcaacatatactcctgacaaccagtctcggaagtccgtctctactctagatcaacaaaagctgcctgaacactcgtctcaatcagctaacatgcgagataccaagcaatctgagccagttcaggatcatgcatctcagcatccggcagaaagatcaaaatcaagagcatctttcccttctgaagagccgaaagcttcggtttctacgtcaaatagtttatcaaaactttcctctcacgactcagtaccgtacaatgctgaaaaactcccaaccaacatggagacaaccattcctcgtgacagctctaactccaatgagcctgcaaaggtcacagctcccggtagatccaatgaggagtcaacgccctcaatccgagcagcgcggctgcctggctacgtgatttcacgggcctccacggccgagacgaccacaacggtctcctcattgccgcctttgaagactgatttcgatcgggctactagccaagccaggcgtcaacctcccgccgggggcgacggtgttttatcgcagctaagaagtaaactacttagcagggatttttggatgcgggatgagaatgccaaagactgctttcattgcggagaacctttcacaacatttcgcagaaagcaccactgtcgaacttgtggtcaaatctttgattcgaaatgcactctgctcatttcgggaacacggttcggacagcctggtaatattcgggtttgcaaaccctgcgagaagatgatcaatgcgcacgatgatgattcatctgaattctccgacagcgagcagagccccatagtggccaatcctcgggtttctgaactcacctggaccagtcctggacgagcatctgcggatgacgatgattcatcttcggttgtgtctcaatcaatcgatcacgttctgagaaccccgacgatggctataccggccacacgacgtgctggagagggacataaccgccgctcggcaattcttgaaattgattctgatcgccctttaacacgacctacctcttcgcgctctctgcggtcttcgctgggtggaagaccacactccctcagtcacaaacgtcaccactctcgtcagcaatatattcggggctttaagccatatcatgaagaccgagcccccttccaacgccgacatgcagatgacatagacgctgaatctcgactccctgcctttcataaagataatatcattgaccctgaccttgctcaatatctctcggatgatgcatccagtggcgatgagcaacctagcctcctgtctgcggtctctgagggcactctgtctaaaagtgggggtgaaaatgagaaagcatcatttggtgggcttctcgctgccatgaaaaagggtagatctgcttttggagaccgaagtactcccagtacgaatcgagacgcagacgaagccagtatcacgagttcaagagccgtgaatctccctcgtttttctcgacgtcgaaacttgagcgttactagcagttatcagccgcgtcattcacccaggacatctaaggacaatatgccccctcatgacaactcagcaccagtcatatctttacccgagaatgtaaagcagggtgggttcaagatgactcgaagttcatcaatgagaggcattgatgcgccacctgtggaattgaacaaagcgagtctggaacacgtacgaaagcttctccatcaactgcttgtagagtctgctgtgccaaattgcgacagctgggaaaacgctttgatgccaatactgttgaaggcagcagatgaggttgatccagatgtccaaaaaggagatgatatggacattcgacactacgtcaaattgaagaagattccgggcggccgacctggtgacacttcttatgtatcaggactcgttttcaccaaaaatttggccctgaaaggcatgtcacggaacatttcacgtccaaacattttgatcatcacatttcctcttgaatatgctcgtcaacaacaacattttatgagtctcgaacctgtcattcgacaagagcgtgagtttctagaaaacttggtcagtcggatcgcagcattgcgtccaaacttgcttttggtcgagaaaactgtttctggcctggctcttggcctcctcgagcaagctgggattgccactgcatacaacgtgaagccatctgttctagaggctgtgtcgagatgtacacagactaggattatgacatctatggataagctcttgacgaccacattgcatagtgaatgcagcagtttcgacgtgaaaacctacgttcataatggtcggaagaaaacatatatgtacatttccgggtgtccgaaagagctcgggtgtaccattatcctgcgtggaggggatgatcaagtcctcgggaatgtgaaaagcatcactgagttcatggtctatgttgtgtacaacctccgtctagaaacaaatcttatgcgagatgaattcggcaggatatcaacctcgccgacagaagaatcagcagttgggcacgacaaagacaataaattcaatccgcagattaccactcacgaaggcaacgcacatctagtcgacctatctaatgctcagcagggagccaacgagaaacgtggtgatatctctgatagccaaattcttgttgatgccgatgctgcaaaagttcctgacaacatcccaatgccgacatactataacgatatggttaaggattacgagacaaagattttgtcggcctctcctttcgtaaaattcgaggctccgtatctcctaacgcgtgcgcgcgaaatggaacgcaggctttcgtatttgaagtctcttcgtgatcaagaccgcaattctaaccagatcaccgatgaaaaggtcaaaccgcaaaagtttgtcctcatcaccccggaaatggtccatcaatcaccgcaagatgcgccagcaaaagtcaaggaagtattgcatgctgcgcatgaagccgagtacgaccgggctctttatcaccatcaaactcaaaagcgccaatgggaagcctatgtggcggggaattccaacatgtttgatccttatgcgcatcagaatttggtcattctctacagtgttgtgtgtacaacaacatcagtcccctgctcagggccagatacctttgccttggagttctataatgagcatggagatgacacaatcttcgagtcagatctcacaattgggcagtatgtagaggacctttgtcacacagcaaattccgtatgtaccgtcaacggctgcgagaaacgcatgttcgaacaccaccgccagtacgtacatggcgaggctcagatcagtgtcctggtccagccttatccttctaagctccgtgggctccataatgccgtgctgatgtggagctgttgcaaaatttgcggcaatgaaactcaagttatgcctatgtccccgagcacatggaaatattcattcggaaaatatctggagctgtgtttctggggcagacacttgcttgctcgtactggaggttgctctcatgatttgcggcgggattatctccactattttggctacagggatcttgctttgcgggtccaatatgaccctattcgtcttctggagattatcgttccacggcctcgtgtcacttggaaggtggacaacgatctgaggctgaggaacgaagtatatttgcgtaccgagcaacgtctcaacaaattcatgatctctgttcaagaccgactgaaaggcatcaatgccgagagtgttgttcccgagctactggagagctgcaagacgaaaatcgaaactttgatcaagaagagtcatgaagaccatagctctttggtccggcacttacaagacaaatacacaagttctcgctattgggagatcataccgctgaatgaggtcctccgtgcagttcaagaaaaggttgtcgaatgggacacgatatttgccgatttcgagatgaactttttcccatctgagaaggatatcaagcatatggcaacactgcaactcaaaaagatcttcctcgacaaagatgcaacatcggtttctacagatgatgccctcgaaactcccacggatgttgaagatgagaacgaccaggaagatgacaggccacggatgatgcgacgtatgacactttcaccggagaaggcacaggatgtactggtctccgttgtcgaggagcacactggcaaaaagcaccgcgaggacctcgaagaagtcgagttgcactcgcctccagcgtcggctgaggaagcaactttatcagtcgatgcaattggtgggacgaggtcttctccccaggatgaggctgtctcacaagaagtacgacatctcgacttggctgttcctgtcggccatgctagcatttcgaatcaatctcctataaacaccgatctccctgtgatgatttccggcgacggatcatcggaattatcaccaccggaaagctctaggattcccgatcaaggaaccaagaatggaaccgaagacagcgtatctcctgacatagcaaataccccagtacgtcggccttcagcaataccgaggcctaccgagctagcctttcgacgcaccggtaagatacggtctcctccgcttttgcgtactcagtctcagccagctgcgaatctaccacgatcatctcacagcattcaacttccggggttgaaactagcgttcgccaacccatccgatccggaaacccctgcagtgcaatcaccaacaaagtcatcggatagaaagctgagcgatcgtttaggcttaagttccctcaagagtgcccgatttgccgcgggtcagtcgcttattccacggtcaaggggaatatcgcaggtttctcacctcgccaggcattttgagcaattgagtcgtgaattcgagaaagagagacagcgcgaaagacgtcaacgcactgccaagggcactcagtcccgagcattcccattggcgtcctcgaagcccatcgtggaggtctatcgaaatgtacgagaggctgttgaagaacgcgaaccgccggttgatagtgatgaatatctgccctcggctccccggatcccaatggatgacatgagtcgcaagagtgatgaacttacgcatgatcataaaactcataatgagccctctctggcaagcgagtctcccgcagagcctatgaaagtagacagtgcactctgtcctgacgacgaactcttgtctggcgacgaagcagatgatcaccaaagtgatgaggatcaaaacatagttgaagatctccatccagtagattcacatgaagagaccaaacagtcaccagaggatgattcaattgatttcaaagaactccctaaacatgagcgtaccacgcttctgaaaatgctgacaaacttctggtctgaacgttctgcaagtggttgggcgtctcttgactatccactcagtgtcatggatcatgtctttgctgattgcaatattattgttcgcgaggatgaaccaagctctttggtagccttcgctttggactcttccgattacaaagaaaaactttcaaccattcaacagcggtttgacgagacggaagaacaaaaaccagatgccggagacgacatcgaggctgcgaaggaagcacaggtcgaacatgctctcttgcgacctacgggcacacacctaaagtatcaattccaagaaggtcaggccaagatgctgtgcaaagtgttctacgccgagcagtttgatgctctgcgtaaaaagtgtggtgtggcagatcgaatcgtcgagtcattgtctcggtgtgcaaagtgggactcaaagggtggcaagacaaaatcgttgttcctaaagacccttgatgaccgtttcattctcaagtctctctcaacgattgagacgcaggctttcctcaaattcgccccggcgtatttccaaatcatgtccgaagccctgtttcatgaactcccttccgcaatcgctaagatgttcggcttttaccaagtcattatcaagaacccagtcactggaaccgagttcaattggttcttgttgttaatggagaacttgttctatgaccgtgtccctacgcgcatattcgatttgaagggctcaatgcgaaaccgcaaagtagagagtaccggtgaacgggacgaggtcctcttggacgaaaacatggtggatttcatctatgaaacccctctctttgcccgcgagcattcaaagaaacttcttggccaaagtgtatggaatgacacactctttttgggtcgtcaagacgtcatggactactcactcatgatcgccatcgatgaaagccgcaatgaactggtggtagggatcattgactgcattcgcacctacacctgggacaaaaagctcgagtcctggatcaaggacaaaggatttgctggcggtgggcgaaatcgaccgacggtcacaagtcctagagaatataagggtcgtttccgtgaggcaatggctagatatgtgcttcaagctccaaggttagttgatatatattccctcgggtgtgcgactgaatactaacgagtttagctgctggcatcaattcccatcaaatgcgatgtaccgctatgagaaccagaacactgaagttgagactgttgatgggaacgggtttgtggaagacactggttactgatagcttcttagacagtcttcgttttgatctgcgcccatgaactgcttacattaatgatttatgacctgacgaattttcatgagacggagtgcagggtgatgtttcatgtgttgggaatttcttgtcatcatgccttaacattgcctctagacattcatttcataccaacattctcatagccagtcccgaatctttttgcctacctctgtacgcagtaacacgtacactgctagaggcgcgtggcctttttggctcatcgcaggcgagcgttgggccggatgcgctagccatgctagtcgtggcattcctgaagatgaaccatggccggtttcccgggccaaatagcttgggtgaccagtttcttgctcttctacagttctatggtactcaggttgacctcaagtctgtcggtgtcgccgtggatccccccgggcttttcagcacagacatgttgcctgtagctcgcggggctgatgaaactgcccaccagcgcggtcagcgttctctgatcaacgtcaagcggaccgctgcgggaaagctcaatatgcctctcttcatatttgtgttgtgaaaagcagcaccctgcaagccctgtcactcttgatctcctgctttccagtgcgatctcgggttaccctaatattagaactttagcaaactgccgggccgactggtttctagatgtgcaagcggataagccatgagaagtcatatttatgagatcttgttttatgccaccaattaattcgagttctcatcggtttggggagaagtaggaagttatattgttgcccaacttccaaagcgttcagcataagtagtctatatattttgaaaaaggcaaagaaatccgttaattaaaggtatgtaggtgcaaccaggagacactgatttgcgtagaaaatggaacggccatcgaaatgttattcgataggccaagggggctgcctttttaggaagggggtagctcatgcgcttcaccaatgagaatatgccgacccttgcccttgtttcggtggagatgattcgtattccacaaccacatcatctttgcggtggatacgccccagtgggaggctatttttcccgtggtcatcgttatgaaggatgctctcttgactctcttgatcgtcgatgttggtgaaacagaggtcatcgtgcggttttgattgcttggagcgatggaatgaggaggggaaattgctgctggtcttgagctgatcgctctttccttgactgtatgagcccattgctcgtttgccgagaaggatttcgaggagtggttgtaaggtggggatgcacgatgctaaaacaacgacgtcggcctcaatactagacggagaacaaagggttagatcatataacaagaggatcggatggaagatgcttacttggtccacatgacaaggtcggcagtaccgtcttttgtttggtcagcctttggttaaagcgagaaggataataaggacatacatgtgtagtcggatttgtcggcaagtccatgcagctgggtacactttataattgccatcgcagaagcacttcatcgccactttggtcagcttctgggtagtatggtatgagttggggaggtatcaacttacattccaccaagccctaaagcagcacatagcgcaattctctttcgtagagacatttggagtttcaacaagacggttgttggataaacggccagagttagatcagcaagagcagagatagctagaagtatggggttaattccaagacatatgtttcaaggggatgagacctacatccagtgaagatagcaaagtcaatgagtaacgctgtacttttgcacttggcgcctgctgcgacaagttcaggcttccacaatgcctctgctggatcgcacattgtgaacaagattataatgcaggtaatagacacgacgcttgtggttccaaccatcgtccacagcatcgccttatgcagtggtttggggttcaagatccgggtcaacatggaagtcacagcaatcttgggaagagtgaaagagaaaatcccgaacaaaaagctgactgtattgagtagaatggccttctccagattgtccgtactcaagtacttggaatgttttccataacccacacccacacctgctgtagagattccgcaatatgcaaaccccattatctagtacacaagctccggttagattcacctcgaaaggacagaaagcctcttaccatggaaaccacaatcaaataatcatccaaaccaaagttccgcagtagcttgagccggatgtagaccctagccacaaccataacggcagttagccccgtcaaggtccacagtacagccaggatcttgggacccttgtcatcgtgaagatttccggcggtgaccaccattgtctcaatcttgatgcagaaacagcggggaaaggccagaaagtgcgaaagagtgcgaccccgttatggagtagtttatatatagccctacaggaaagggcctgctaaaaccaacaatagcacataagagttcacatgagatatgtacatggaagtaagtacaggattgatttcagtgtgccattattcgatcagtcactccgtactattattttcctgaaactccgttaaacagccaatccttcgagattttagttgcgatgatcgtcctattttggtaagcgcattgttcatcattgtttgacgatttatctccgaggtcatcgtctacaatagtattatagctagctcgtttttacggagtactccgtagtcggataggggtatgatccctgtcacgctagctagttagtcgatgccgctaaacgaaatgacagcagtctcggaatgggaccccaatacccggtggacgggcctgcatcgtaggcagtagcttgagatactccgcgtgcactgccctcatgtcgaataaccggggttttatttggaaatatctggccaacctactccgtagtctagaaagaaacaattgtaccatgcagtgtagatcttgggtgaagtctagatcatattctgggttctaaaaatttgctgacatttcaacctggattttacgagtcccaccgtaatacgaagagagtgggtggtttctaatccaccagctcgcctcgtgggtcttttttttttcaagtccaagttgaaaatagacaaaagtacggagtacggagtactacggggttaagtacgtcgtcgaatataaggagtgcagagcacgaagtagcccgtgcgaacaagcgaaatatcgttaaaaaaaacaccaaaaaagcgcgattagccgtctcgatgtgggtatttggtgtggatattaatgtattccggtccattgagccgattctatcagaatctcagccctctctgatcaattccacatactccgcttatatatttacgcgattcgttgaggacaaagtacatgccttgtacttttgcacttggatggggaattagctttagccaggtcattttagcacatcaactgcctataacgtataatgagtattcctttgggacatcttgtgatagatccatccatggatgtgggcccatccgctctaattttattgtgatgatccttgagttattcggtacttattatatacataggtacaacataccaagtgatattcttggcttgggcgagccgttagacaatctgctcgtttgttacctgaataggaagaccgttgaaccgttgcgtctccacttcctttgtcccaactggcaccgacttactccgtagtgtcggtggaacctatcttctagcacagtgctccagtgggatgaataccagccggtcttcatgatagcggatccatatgattgaacccggtccaaccgttgctcagctggcgtagcttcattaaagaaaaggagacagtgactgtagcttgtttcaaaaaaggggatacgtagataatgaatgtagtatatttaaagacccctggagtacttttgacttggatcacttcatattcttctgcactcccacgctatctatattacattacattcacaatggccgacattgcaacccttacattgagtgaaaccacccaagctaatgggaactcacacacggagggcacaatccatgcaactggagattgccagaccagcggaggcctcgaggaggccttcgtcgaccgcgtagcaatttccgccaacacacccgagctcgttcctggcctggttgatcagattgcttcccttggcaaagtcgccagcctgcaagacaacaccgatcgaacaacccttttggaagccgctcgatccctggtctacgcacttgagaccccacgtgaggctatgatcagatactgttggtctcaggtaaattcccgtgcttctaaggcacacctttgtgctgttgacggcaactaatattgatatcatagtctaccctttacgcttctttggaaacaggtgttgatctgggcctttttgctatcttgtccaaggatgacaagcccaagtctgctgccgagttggccaaggccaccggtgctgacccagttcttcttggtacgtaacttgccatccgtcctgtgctttgtcggtacactttactaactacatatttgtttagctcgcattctgaagcacttgtgcgcaatgggagttatcctcgagactggtcctaatgaataccgccgaaccggagtttcaatctcgctaagcttgcaacgatacaatgatgcatacccttgcatgtaagtcggaatttgtgggcatataatccaaaaggatgatattaactcattggttaggactaattgcatcaccgccggtgtgcttgctctacctgcccagctcaaaaaggacggctataccaacccatcaaacggcaaggattgcgctttccagcgcggattccgaaccgatctccacttcttcgactttatgaaggagaacctagatgccgctagccagtttaacaatcacatgtctgcctaccaccaaggccgtcctagctggatggatgtcggtttcttcgacgtgcccagcctgttccccgatgtcacacaggacgatgttctcctcgtcgatgtcggcggcagtttaggccacgatatttcggagtttaagcgcaagtggcctgatgctcctgggcgtctggtgatccaggatcttcccgatgtggtcgctcaagccaagtcaggacagctagatccgtcgatcgagacattagagcatgacttcttcaatgagcagcctatcaagggtatgatttccccttctatgaccccctctcaactcagatcaaaactaatattttcttctaaaggtgctcgcgcctactatatgcactctgtcctgcacgactggtcagacgataactgccgcaagatcttgaagggtctcgtgaatgccatgaagcgcggacacagcaaggttctgattaacgagaatgtcatccctgataccaacgcgtactgggagacaaccagtctggatattattatgatggctgatttcgcttcgaccgagcgaactgaagcccattggcaccaactggtgggatccgctgggttgaaaatcacgaagatttggaatgcccagaaaggagtcgagagtcttatcgagtgcgaattggcatagatgccacctaggtaatgggatctgatactcaggatgatagattgtactggttttgaattaatggatatattttagcatatgtacgggccgcgccacaaattgtaagagccgaaagcaacaggaaccgaaaaaaaataataactaaacaatttgttcaatttggaaggtagcagtagtgttgatacttgataggcatacaacatagacagtggattttagatgtgaacctcgtatactagtacaaagtataatgctgacggtaactcgggtggtgatcggcggccgaaggcccgaggtccaggtggtgagttagaataaaaccggttcaaggccgaccgctggaatcaccgcctttgtgtttatgttgctgtggtaattccaatacaatcacattgttttttttttaatacattaggtataatggtacatactcctactccgtactccgtgtataattacctatgagtctagaacaagccttggagaggtccgtgggcccctggacccctggaccgaccgtggacttacccgttagtggggccgcccagccttccacggttgggacgtaacttcccttttcgtctgcttgctttctctattctttcccctccccctttctcacacacgcacattctctctttccacagattaaatgcagatataataagaagaacaacacgaaagagaggaaggaggataaattgtcatggcagagggcgattctcctatctcggaccccggaacccccggaccccccgggatctccttctcaggtgatcggcaggcgcagaaacaggctagtgaatatcataaagcaaaatgacctccctcaactccgtcgattcatcgcctcatgcaatcccgaggatgtgatcgcccctgggacaccctacttagaggacacattgttcaatgcagcctcgtacggcagtcccgaggctcttcaaattctcttggatgtgtatactacggccccggaagttgtcaagaggttcaaccccaagttccgtctgctgctcgacgcatgtggcgcggcaaatattgatgtagtgcgctttatcttggacagtccagaaaatcagttacctctcgggacggtggatttacatcagcgagatgattccggagatacgccgatcctcgtggctgcgggttcgctgatgtatcttgataaagacccagatgaagtagaagatgagggtcttcattgggctgagtggattcgggatcggattgcgcggggccatgagttgattcatcttcttctcgaccgaggctgttcagcgacagatgttattcctcccttgccaaatgatatccctccctggggaagtcaggtgcaagatagtgtgcttgggcttgctgtgtcgagggctaatgggccgttaattcaacggctcattgactccggtgccgatatctaccttaagcatcaacacttccatcatgccagggcaccgttccagttcaggaccgcaaagggtcacgcgtatgatgtcacaacgctccatctagcaagtctattctacaatgctgatgttgttgttaacttgctcttggatcatcaacattaccagaacaataccaaccctgacctggcttcctcctgtgatagtgatgggcgactcccactaccctgggcagctagcggtcctggaggtttttactgtagactcctatataagcagctcggaatcacagagatccttcgactgctcctcgaccatgattctattcgtatcaaccttattgacaacgctagatccacgccgctacactatgctgctataagccacgctatgtgccagcacgttgagtctactatccgcactttactcaaatacagggctgacctccggatccccggcagctctggctgtaccatcctacatctattaggataccactcccatcaaggtgaccctatcaagaccaccctcctcgatttgctcctatcacacggtgtcaatatcaatcgtgccgagaacaagggaaagacggaattgcacgtctttgcccagaatttgcggcaggtctcggcggcaaggttcgtaattgagcaccaggcggatttccgcgctcggaatgctttccaggagacgccctttcatgccgcagcgcgggggtttttgaatgatcatatacgatgtgatgggagggataaggaagtgacaactgcgaataagatcaggcttcaggatgagataatgcgtgttctgaaggaggctgctggggaggaaactgctatgttgatgggtcaaccaaatgcggagggtaaaactccgcaggatttactggaggagaccagaaatcggtggcaggggacggagcagcgcataccaggtcctggaagaggcagaggcagaggcagaggcagaggtagagggctgccagtaggagcataatgacagttcaggaagaatatctatctcataagggtagcaatcgtagcatccacggaccaccagtacatagaaggtcaaattaacgttcaatttgaaagtgttacagctatgtagtttgtatcggactgaaatacgaacaatatctttgttttatacataaaattggtgctgtccgcgctgctaaaggagataccaatgaacacagatctatataatccaagggctaatctctgggaccatcggcaaaaaccgggatcggggcggcaaaggctccacgaaatttgttaacgaatttactagccctgtttttctaattctctttttcattctttcgccaatggcccggaaaatctcaaaaatcgcatcatttcctgctgcagagaggggtaagtacagttcgtcagcggcgtatgcccgggtgatatcgtcatcccctcgggcacatggatgggcctcggtatcgggctcctcgggtccctgcgtcccccgcattggtttttttttgtgcaagttctttttttcccttcattcttttgactgaagtcttcttccaagaggatggatcattctcgtttgaatcgcgcatgggatttagagcagttactccatgcatgcgacagcgactttcgtggactcgacgcgcgacggatgcaagtctataaggactcaagcgcaaaatatcagtcctatgtctattcattgaattgtctggtctctactaactcattaatttgaccggaaagcattaaattcgtttcatttacatgagcaatgtattaaccttccgggctatggtcccagcgcagaacaaacttggcttcgaacgaaacaaaagcgagaaaagaaaaaagaggtatgtatcccatccgcacaccggcggtaaaaaaagcacactggaccattccatcaccgaaagcttaccatctgatgagtttacagaaggtttactccatggtcagaccgaggttctcatcggcgggcaccacacgaacggtgttggtgtggcccataccgccacgccatccctggacacagacgatagagtcacccttgttgatgattccgagcttgagaccgtggttgataccccacttgaggcgacggtcgacatcttcttgccagatcttgacgttgaaatcaggcttggtctcggggaagtagaacggccacacaccgcggtacaagtgggagtactggaactgttgtcagcaaagaacgatacaattcgaacgatacaattcgacttacccgggcagcggtgtcattgcgagtaaccatcaggatggggcagacgggacgatacttcgacacaaggcgggcagttttaccactatgaacttgttagtatgatcttcatacaaaatgacaggaaggttccggctacctggtggtcagaacgatgatggcaccggcattcagctccaaactggcgctgacagcggccatggcgatggactcggaggtttcagtggggcgaggggcaaggttgcgcagctcgtcgaagacgttgaagtgaggaatggcaacctcagccagcaagcaggtctcggacatcatccgaacggcctcgcaagggtagttacccttggcggtctcaccagacagcatgacacagtcagcaccgtcgagaacggcgttggcaacatcggaaacctcagcacgagtggggcgggggttgtatgtcatggactccagcatctgggtggcacagataacgggcttgcccttgatgttgcacttggcgatcatcatcttctgggcaaggaaaaccttgggggcagggatctcgataccgaggtcaccacgggcgaccatgacaccgtcggtcgcttcgagaatctcatcgaagttgttcacaccctgctggttctcaatcttggcgatgatctgaatctccttgccgtcctcgccaaggacggaacggatgtgctcgatgtcgctgccgcgacggatgaatgaggcaaagaccatatcaaccttgttctcaacaccgaatcgcaaatcggcaatatccttctccgagagagcggggaggtctacatcagtgcccggcaggttgacacccttgcgggatgagatactgccgtcgttcaggcacttgaccttaagggtctgcgcatcaacaatctcaatcacctcgaatgacatgatgccatcatcaacatagatgagcttgccaggagcaatcacattggtaatgttcttgtagtccaggtacctgtcgtcacacagttgtcagtccacatcacatgtcaaactcgacattgagggactgtcggtccattcttcggaatgggaatgatcttacatgttcttatcgtcagaagcagtggcgtacgcctcatcagtggtgatgttaagcacggtgccctgcttgatggggatgtccttgtcaccgggggtgttaccggtacggatctcggggcccttggtgtccagggcaatggcgagagggcggccaatctggatacgagcggcctcgcgagagttgtcaatgacagattggtggtactgcaggccaagtcagtgaaggtcttcattcgggtgttgattggagatactgacctcgtatgatccgtgggagaagttcatgcgaacgacgttcagaccggctatggccatgtcagactaactatccaaaaatgctgcccatttccatcggaaactttattttcatacctgtgcggagagcattgatcatcttggcggagttcgtcttggggcctgatcgattggctgttagtaaccggtgttttttttctctccaccagaacctccctgataggttcggcctgatgttttctttgacataccaatggtacagatgatggaggtgcgacggaagttcttcgcaggcaccatatcggtgctgagcttggagtaccactccagcttcatgcggttgctcaggtggtcgagggagtttgtaaccgccattttgagatgatcaacaactgttgaattgatgtagaaaggatgagggaagttctgatcaattgagaatcagggaggatgggtagaagagaaggatgagaaatggaggggaaagagaaaacggatgggtgcggggcggtaggaaaaatgttgcccgccggtgtgagtattggttccatccccaaaacatttttttgtactattgcgaccagaccatatctttctaccaaattaaccggtgaattctgtgacatatgaggatttgactgttcttatttctttctatttgttcagctatattctctatttactaaaagctggaggtgtggttagaggcggcataaacagtccaaacagaaaaaaacaattatatatcaactccggactgggctgaccgcaaaaaagcggaggattaccccgtgctggcctacgcgctgtagattggagtccttggagcgagtaaatgtgacaaatccagacacccaattgatccaggccccagctcaaagaccccagagggatttcggtgggatgagaacgcttatcgatagaccgaatccggactagtgacaatcttggcctcgatccggccccagccacaatgtggattatgtcaggtacaaccagtttcaccagcctcgtctccagccactcgggagacgtcatgtgaatatccacgtgaccgctctttaggcggtcttgatgcctggtctcctcttactttcgcctcttaagcttttggtaactcccggttactcaatatccacagtgttgacacttactactcggaatcatggtgagtgacatttgctggccgatcctggacaaccggggtcctcggaacatagagagcatgccatggctgactcggatgtgctgcaatctagttcggccgtcttacccactacgcatttgatgcggttctccgtgagtcctctaaagtgtccatattgtacctccgaatacagactaaccagtgccttcaaccgcagtctccgccttcctcgcaggcgtcaagcgctccacgggcctcacgtaaatgcaccctacccctcacgatcgtctttttccaagctattgtttattctgcttgttgctcgtcttgggtgcgctcgatatccatgagagaattcttagctaactctattactcctgcgcacccccggttgggtcgtgtgtgcgtgggaacttcatagccccagcctcaattcagacaagatcacagacaacaaagacatcaagaaatgggttgatagctaccttggtgttggagagtggatgatggaccaatcggtggctgttatgggctcgtccgcctggtttgaacgacgccgatgattgaccccgccatactcgacccggagagacaatcggcgatccctttctcgcgacttgactttcggccgtcttgtgtgtatgattgcggactagcggcacatatctggccttggctctgactcttggccctatggcaatgtgatacaatatcagtatgtacagactgagtctgtgttgtggctgtgtctctttaaatcaccggcacaccacaagtatatgctttaaagccgaattgacgagtgatgaccaatttttatctgcgctctagcctccactttcgatcggtgcttatatggtcatggtgttttgcctgttttcgataccttttatctttctgcatgtctatatcatcacacaaatccagccatgaaattagcagacaattcttggaatattctccttgtaggtatgaacataagtcacgggcttgtcagacggtgctacccggatagctcgaggtcactattggtgcatacctaggtggcactgcatgcctgaagctgactgctggcgagctacgagagtttcgttgtgaactacatcgtacgctatgtgaactactgctgaaaagaccaggtttcacccgcaggagactagttaatgattaccgcgggacgaaggtctatgtcgatatcgtggaccttgctgggagctcatctttcctcccaagatggaggctaaacccagttcacgtatcaatcacaacctaaacaacttgataaacgtaacatggaaacaggggggtattttacaaataaaaaacggaatgaagtaaaacgagaaccacaaaaacatgccagtcaatcatacaatacgtagttagagagcgtcaatgtccacacggcggtagtaagagacatggcccatttccttccagtaatgagccatgtggtcaggagaaataaggatcagttgggactcgatgtaggtgtctggcaaattacatgttagacaagaccgttatggtgtatctaccaaggcagcttaccgtcgtggaacccaagtccagcgacatgaccgcggcaacgcacaatccgggcgccaacaaaaggctcttccgtcccgatactaataaagccgctggcgccaatgtcgtcggcaacaaatgagtactgtccacgaggaacattggggtcacctgtcagcttgacagccagcagcggacctcgatgtctaacatcctcctgggcgtcgattatcttcgactcgttttcggaaccaggtgctacggtcgttattttatcctgggagacaagcaggaattcacatccatgggccgaataatctccaacccaaatgccctggtagggtttcgcttcggtgggggtgtaaaggacaggatcgagagttgagaaggttagacccggttcgttcggtgccggagacgtaagctcttggtttgcccacttcctgacacggaagaaagactccgacaaatccgataaatatttcggtattggcggggacgagtccctcaaatcacgaactgtacgtgcattggtctggatggttcgtggtggccaaagcacatagggtttgaccctagattcgctatgtttaaatgaagagcaaagagacagcgaggtgtacatatgtcgggtatccgaatacattggcatgtggcgctctggcattgatttaaaggattggattggagctgttcgggaggacggattatggtcgctgagaaacaagactggatcgaaccccttgtatacactgggttcaaaagactggatcataacttctgggtgtgatatccatgtttgaaactgaggaaagccacggtctgcaaagaccggatatgcttcaatcacaccccgacgattatcatatcgagctatgattagcatccctgtgtgctccgtgtctgcgaaccagatcttgtgctgaggaatgaaccaataggggtgatatgcaagataaagtcggcgaaatgactcaaagggacctgagttctggataggagtaggcagtctctcgttcaccaggctagcccatagtaagtcattcgatgcatgatcgacgagggcccggcaagtggcaccgaggcaacctagatctggagctgagagataagatgcaatctcatgaatgagttcagcgggtaatttctcaaggaacgatggagacagttgctcatcattaagtgaccggtcgttggggccatcgttgctttgttcctgcgacatgaaaacgtcagtacatggccgtccacggtatttccaccagcaagaattagacatacccggctagtacgggtggtaatcgccatctttccttccgaggcttgattcattgaggtttataagagagagatgatccaaagtattgtaaatgacatcactgggaaccccagagtcgcatggagataagaacattggaaaggggatcgaaccagtcacaggaaagactaataagcctaatattgccaatacagtgactggacataagtttttgcacccccgcatactcaccgtcacgatagactcataccgcctacctaaaaggcgtaatatatagatttcatagtatgaagtcatggggttttggccggcaatatattatataatcatgggggtgtggggccaggagtacaaatacttatgtccagccactacggagtatgttatctgaaagctgtgaggcgccaggtcaatcagaaaagaaagagtggaaagcagccttgttataaagctgctaatcactttgtctgtcaacgttgtaagcctcgaacgtctagctcagctagctaacaaaaaatatatgtagcaaacaatctgaagtaaacaattgcaaataataagcgagcaaaacatgaagcgtgtgatagcgatttatagtagatcgtgacaaaaactgcctagctttttaatctcgtatttggagctaggacatttagagcttaactttctctagccgctatcttcttaatggacttccggtgaatagattatcgtatagcatataaaaaataatctatgattcctacagaaaacataaaatcaacttaacttggtgttattgcaaagcgataaggtcggattgaatcgcagctgattttcacagcatttaagaggagagcctaggaaagttaagagtactggtaaatagaacaagaacataggatttcttggcacataaactagggttaattcccctccgtactaatctgcactctagaccccttgaacgcgttggtggctatgtatgtgtagatgccaagaaacaatgttgtcagagtcagccaataacgtctctacagcatagtacgtctctacgccatagttcgtgttcgactgaaagggtcagcgcgaggattgatacggagtatagaggttgagcctcgaggttgagcgatgaataatgcctggttcccacgatattaatagtatacttgtctaccttcacctagccatactgtaaggcgatgctcgtacagttactaatagtaagccatgcttgcctgggcgcccgatacagtacaacagctaccctatccaaacctaccctatactgtgtcccataacggagcatatcacgtgaactaaatatcacctgaccacccaaacaagcgtcttgtttaccattgcccgaacaggaaatatccaggaacgcgcctgggcccctgctgcctaactacaatgtatagagccccactttgtttgtttatttgtgatctataacgaattctctttataagcctatccctgcgtacacttttattttgtaaacgctttctttgttttggccttattattccaatatactctccttatcaacatggatactcggtcaggaaggaaacggaagagttctctctcaaatccaagccagtcaccagtctcacgccgaactaggcagagcttggcagtggcacaagaagataccagtctcaatcaacaacaaaaaaatgtatctgttacacccaagaaatcaagaaagagagtccggttttccgacccaggtcctcggttattacatggtgaagatattgggtcgaccggcttgactccagcgatgcgtcgaacatcgttcgagacagaatctggggatagcacacctagccgcaaatcccgacgcaggtctgccccaacaccgcgctttcagcggtcctatgacccggaggagccgtttgatgaaacatgcaccgagaggaggatccaatttaccccgctacgccaaatcctcgacacacggacccagagaagaattaggcgaatcgggttgagtgatgagatcaatcagattgagcgcgaaaagcgtgagacgcggaacatggaaaagaccatgcgagctttgcttcaagagcgagattctctgaaagatgaactcagggccattaaacaaggtggaatgggcttggaggaccaaagttcggtggctgagtcttattggatgacgccagagacacctagattttgcgatgaagtatcggtagtttccagtcacagtctggatgacgccgctccatctacaaacagtgaagaggagacgttcatattcaatgacagtgctgtcattgtgtccagctcccctgatttccgtggtatcctgcgtcataatccaccggtcactgatagcttgatgctatccgacgaatcacaaacgcagactgaagtcaatacagaagaatctgatattcgctccctgtcccttgatttagaggctgccaggaaggagaggaaaagcttgttcgacgcatgtcgatcacgaatctcagggttcaatgaccctacaatcagtagtcttttccgccagtcatctccaccaccgaacttcttcgagaatatcatggagatcttagaaaatgctctgtctcgtgcgtcagatgctgccgaggctcttgaaggagtcacccaagaatgcaccggcttaggattctccggagacggcgtggacgatgtgatagccgacatgcggaaccacttccgctcagctcgcctcgagcttgagcgtgcgctacctggtgagactgccaacgttagccttgacgacggcaaggcaaccttaggtgcgctggtgaggcgcgttgagtcactggcaaaagatctagggacggagcggcattatcataacggctctctgggccgggaaagggctctcagagggcaatttgacgccttattacaccgatatgagacagctgcaagcaaaattgacagtcttgaggagtcgatcgcatcttctgcaagcgatatgctccacacgcggatgcgaatgcaagaactcgaacgcgaagggcaggaacaggccgttgggattgacagattaagttcagcccttgacaagtacaatcatgaagtgaagggcctcgaaggtcttatcgacaatcttgaaaaggagaacacagctacaaaggaggactacgcccggcagatatctaagctcaaggagcaagtggcccatgaacgttcaaagcgctgttcggcggaggctacggcttctgagtccgagtcccgtattcgagaattagagaaaacagtcgagcacaatcgcattcgcgcttgcgacttgatggctcaggtggagcttttcgaaaaggaacatcaaaaagccatcgagagccttgagcaaaatgccagtgagcgtcaaacacatgaggcagagacagggactctcaatgttcgcatctcagacctcaccacatcattgcatgctgccaagtgtgaactgcagcgtcttcagaatatcaacaccggcctcgaagaacagctccagctagaagtcgaagctcggaatgagctcctagataagtgggccgcagagcaagtgcgatcgttcgcccacatgaaggagaccatcaactcagaacgtcgcaaagccaaagttcgcacggccaattgggaattgaagtcggacgatctcatgtcagatggcactacagtgggcggtgggagtgaaccaatcactccggttagcgcccgatttgttgatatcgaagttggccgtggcaaggataggcgacgtatggatattgtcaggatatcggccgagggactggaggatggcatttcgggtgtcggcagcgatatcggatttgatgttaccgccggtgatttggcttaatttttgtatacgacctcgattatttatttatttacatgtttgttttgggtctcttcaatttctccaatttcttcaactttcttgatttccttcgaatgatatccttcgaattatcttcatcttatcttcatccaagcctgcagatgtcatacataatagccaagtctttccaaggttttggttttgcggggatcgtctatgcccctgtcagggacaacccggagatacgattgttggacggctgatatgtggagcttcaccccctctcttcggagctgatcttatccaaaaagaatggaaccgttacgatgctaagttgcatttaatatatacaacagcaataatctcaacaatctcaacagtctcgagataacaggaagcgaactcctatatatttgcaggctgggaagcccccaaaatattcctcatgcctcctcataccattcaaacttcacgatgagactcaagctttcagccatttccctcattgcaagctgcggctcgctgtgcagtgccacagaccgtgtcctcaagcatggctctcctgaatcagtgggacttcttgccgagcctctcaaggagatgccgctcaacttgagccagtacactgttgctgccaattatggagcattcacctacgatttggttcaccccgtccagccgggaggctccgttgtcgtcggtcacaaggccaccattgtgagctccttcgctttcggccatacgaacatgtatgcagactccaatggcacattgctccctcacgcaaagtggaccccgaaccacatcgacaccatctacgatatggccagtctgactaaagtgttcactgcggtggccgcattgcgcgccattgacgagggcaagctcagcttgtacagaaccgttgcctcctatatccccgagttcgcgaccaatggaaaggaaaacatcactatcctgatgctggtgacccacacaagtggcttccctcctgaccctctgcccggtctgtatgatccatcttacacgaccatgcagcagcgtgtcaatgccgtcctcgagcaagccctccaggatgctcctggatctacctacacctactctgacttgaacttcatgaacctgcgcttcgtgttggagaaggtcaccggtaaaccattcgatgagtatgtcaatgagtacaccagcgagctcggcatgaccagcaccttcttcaacaagggaaacaaccagtccccttcattccattactactcgcgcatggcaccgactgagtaccagatcgaagttctgggagacgacgagcccaagcgtcctcagcccgtgcgtggaaccgtgcacgacgagaatgcctggtctcttaacggtgtgagcggacacgccggtctcttctcgaccgccggtgacgtggcaatcctctgccagatgatcctcaacaacggtacctatggcggcaagcggatcctgaagccggagactgtcgacttgatgttccacaacttcaacaccaaattccctggtgatgagcacagtgtcggcttcgagctcaaccagaactacttctccggacccatggccaatatgcttgctggaggccacactggctttactggtaccacgcttgttgttgatcgcgcatcggacaccttcatggtcatgatggcccaccgtgtgtatcccagccgtacctggtcgagtaacaacattgttcgggaggcggtaggctattgggtcgcccgtgcgcttggtcgggatgttgccttcccttgattttttgtgagatgaaaattatctaagttgactggaacctactgtaaatcacaaagggggaagaggaggaaaacttgtgtatagttaaatcgtgtgtttagaataatatgctcaatgactatttgtcctaaacattaaaatcaaatggtatatctctcggtgcgtaaagcacaataaactcccaaacaaacaaacaaacaaactaagcaaattgcaaagcctactcgctagccatagctttgggctgaggctcaatgtgctgcttgtgcccaggtcgagcaaaaatagccccaaagagattgaaaaagttattacagcgaagtaacatgcaatagaacaaggtgacccccgtaaccataatctcctcttgtgcagctctgtcatctgccttggggccaacaaactcaatcttgccaaggttggtgataccccagacgttggcagtgaattttgccacgggcatctgctgctcatccacacagataaagtcccaggtcttgaacccggtatcactggtccatgtcattgtgactggggtttcagtgtcggagaagttgagtgagcggtgggtgtacaccgtccgccagcgtttctgggctagaaggtgggccttctgtccgcgtagttcgtagtcggcgttgatagagaccgcgttcagcttgccactgccgatgacttcgttctcgggggcttttttgaaaaccatgttggctgtgagactgaatggggaataatggatggtgtataaggggtctgttccggtgttggcgtcggagataatggccttccacttcttccatgtaaagcttactgtaaaagcagcgctcttggagagactctgggtgtcttggggaatattggatgaagacattttgtctgagtcgactggattcttagaagtagaagaggttaggatgggttgatggatatcggttgaagccatagattttgtttaacaaaagttgatgtttgggtttttattgatcttgtctttgatctggaatgaattaatcctttagaggggagatttcgaccatacttatataactcgtctcatctggtgcccagaggcgcagagtcttggcatctccactcatttaggtatatcgcactaacctctttgggtgccatgtaccgctccagccaatcaactttgagcttggggattctccgggggccgtgatgtcattccaacttgagatttgggggccagctgggcaggggctgagtgtctgcatctgcaaagtacaaagtacttagactaacaaatagaaatacttgtgaagatcgtaatgtcccttgtacagcgcaatgttggctgcttcaaacagttctcctcatttggggaagatgcatgctatcttacctagatcaatccacttgaataccttggaacaattagtagacctgactgatagtgttaccaagtattacccatagctcttcggagccagagaaatagctggctattgttatctatgtaggcgtagttgtaatgagaacgcagttatcaatatttacttggttgtctttgagaacgatgacgttgtcgggcgtcaagcatataaaattaacttcattggccacacttcaaataaactttcttcaacagcttgttaaaccgtggaattttcttcgaggaagtcttatcaacacacttgactacgcaccccaaacatggttagccaggacaccaatgcacacaagttccgcttgaaggtaacggcaggcgcagactacgaccgcaagactcatcaattggtacctgtaaatggcgagacaatccgaatcgaaaacgagcatgctattgtgagtctctgcgtacggatcaagaactacacaggtaatacccctactctcatctattcggtcaaagagcggagctcatcggtcaaacaggctatcctgagagttcaccttccacaagcccatactttgacgatcccctgcaccaaaaagacctatattccatatgcttctcaattatcttcaaagagccggtgaacggcaacaacctttacttcggcaatgacttcgatcaccctgtccgcgacttcctacctccgggattcaacacagcactacggattgtcaagtggaccctcgaccctggcctagacggcgatgtctacgctgataagccgtatctgtacagcccggcattggcatcgtgggaccagttccgcattggagataaggtgcggaaatccgacgaggtgccaaagctcgatgatgagattattgaggagggcgcttatagcaaagatgctgccagtgtgcgtcacaaatttaacatccctgatacagtcgagggacgcagaaagtatttccaggacgaggcgaataggaaggagtttgaatttgaacctgggaggatgtatgttgctgatttcggaaatccttatttggcattcgaaggttagtgagatgcagatttgctcttttgattgggatcatcgactcactgatcatattagacttctctgtccgtcttcctggatttgatctacctatcatgaagtacgtggatgagaagaaccatgagctgcggtatacgctcaaggatatttcaaccggacgcgtgtatcttactgtattgttctcggtggtcctacgcggaacggaagacgagcaagaccatagtaagagtgagcaacgtgacgacagtctagggaagtttgactgggagccggagccatcatctggcgatgtcgagtgattttctcgatttagcagggtatgctgtagttgcatgcaagaaaaaacagtaaattcgtctcaagtatcatgcaaactttgaattatatacagatttactttttacagtctcttcaggacatcctccaaaacctgctgagtggtagcctttccacccatatcgggggtcaggaactgagcagcatccaggttaccatcgacagcagcgtagatctgggcagcagccttctcctcgcccaagaactcgagcatcagagcaacactgcggatagtagcaatggggttggagatacccttgccctcaatgtcaggggcactgccgtggcagggctcgccggtgggggannnnnnnnnnnnnnnnnnnnnnnnnnnnnnnnnnnnnnnnnnnnnnnnnnnnnnnnnnnnnnnnnnnnnnnnnnnnnnnnnnnnnnnnnnnnnnnnnnnnnnnnnnnnnnnnnnnnnnnnnnnnnnnnnnnnnnnnnnnnnnnnnnnnnnnnnnnnnnnnagggctcgccgatggcgaagccatcaccaacgttggcactggggacgagacccaagctgccaacaagggcagcagcaccgtcggagaggatgtcaccgtagaggttaggggcgacaatgacatcgtagaactcgggctggcggaagagcttgtagaccatggagtcgacaatctgctcctcaacgaagatggaggagaacttctcggcggcgagagcacggcgcgcggtctcacggaagagaccgtcagtctgcgagagcacgttcgacttgtgggtgatagtgaccatgggctgggcacgggtagaggtggcggcagccgcgcggatgctctggcggcggagtgcaatctcaccggcgatgttggcgatgcggaacgaggcatgctcggaaatacgcttgatagcctcggcaaccttgccgttaggggtatcgatggtgcgctcttccttcacgtacaagtcctcggtattctcgcggacgatgaccaagtcaatgggcttgccgttgctgttgccggcagtagtcttgacagggcggacgttggcatacaggtcgagcttcttgcggagagccacaatgggcgacgagtagccggcgaccttggtgctaggggagctttgggttggtagcaattgtcagccggaattgcgcatgctgaaagaatgatatcgtagcttacctgacagcaccaaagagagcaccgtcacactccttcttcaaggtatcgacagtcttgtcgggcagagcggttccagtcttctggaaggtttcgtatccagcatcgaggtcgacgaagctgaacttgaggttcagggacgcggggagagactcaaggatccgacggccggcctatattccatcaagcaactccagtcagtgaatcgcctcgcatatcagatcttgagtgttacccaccgggatgacctcgcgtccgataccgtctccggggatgagacctataatattccgatcatgtcagtcaattgccgagccacgagatcgcaaaacaagggcgatcgtaccaatgcgaagtgtccgggcagcagccattttgatagacttttttgcagagttgctttcttgaaatcgacaatcgccgtcatcggagcttttgattttgtatacggctcggattattgttgatccgatatactccggagaaccccatacgaagtgctttagagactcggctctctagctcacattcaataaaatgctggcgatggaacaagatcaaaaagtaatgtgtgtctgcttgaatattgagttcaagaggaaatgatgcagtcacctgggaaaccatcccaaggttgcatggatatgcgttcggactacccaaacgggtgacatctcgcgaaattgaatatggacaatatcttcggaggttctttgatggcttcgccgaactttaaactatccattttcatcgtgctgctcaatcttggcaggtattatcaacgctaaacccaaatgggtcacttacgatgtaatgaacatacccctcatcttctccaagcgcccggacaagccgaacagttgatgaagagttcgcgtcaatcgggggtagtgtaagcccaatgacactgtgcaacgaggcatatgcaagcacagaggccaagtcgcgaggtctaaatattagaataatcatgacgttctgcaatgcagaccattcagcgattaaactgaatagaacagatactacacttgatctaagccagaggcaaagagagctgaagaagaaagaaaagaagaggaagttctgggggcagggtcaccttatatgtatcctgagggcggtcggtttatgccactatttacaaatgagacaaacaacgacatatgctcgcttaattaaatatgtaagtggtaacgtgatgatcaagacaatcactgttgatatcaattagatggctggacataccataggcgaggatatctctttgatatgttacttattggcagtgcacaggcacacgatgtgacctaattagtcacttataaattgaaccccactctcagagtaaatattcaaagcagtgcagatggcacttagtttctcagattgtattcgatttcgatcccgtgcttcatcacccaaacttattgtcaactctttcttcgactccaggactcagtatggcattcaatcttatgtcccattcgttggattcgccaatctcaaccgggaaacggaatattgccatcgcagaaattgtcatttattcccttatgcaggcgatactggcaccataacaagaacaagagtattggacgctgtgtgttctattcttggtgaagtatggttggtctgctgtcacagagtaagtggaagacgtcccaactatttcaaaaatatggccattgaacttatttatagttcgcatagcgggctcagccttggttcttgctaactcacacccggagaagctaatgctcattgctgattcaattttgcaaagtacgggcctttcacccctacgagggcttgttattaaagctgttgatatagtgtttacttgtcgtgatggtccctaaaagccctcgtacacccgtcttgtttgaagttagcttggttctattgcgatatttcataagcctggacctcgcttttcttctgggaaaagactgaatatactggcaatatttgtctgagtagtggacaaaatggaccaagttgacccggtttgctctttgctctgtatttcttccgtttcccgagttttatcgccatcatgctagcagtggtgggtattttagcatggatacaacccactcaccttcactcgtttaacactgagcagccattgctccgagcacgccgacaattatgaatcataggttcatattaatccaaagaagccaagagagttggagaagactcatatacaacataggatctggtacccgtcacgtgctcccatcggacatgccccgagatcctctcattcgccaaaaggaaggtggttgcacttctattattggccttttctcttgaactaagatcaatgcattattgtgatgtacatgatcgatctatctttcaacgttaattgggagactgtatttcttggctatgctattataccttcatataagttcaatattcctctaaagccgggtatactgcaacacacctggacatgccttggctaatgtatacctcgacacatggagatactggaactatttcgtgaataggagcaaattaggaaaatagtgcatattctgcctcaggcacactatgccccttactcaagatgaatatccacttgtaaaggtgttcagatatcgtggcatgtttcagacctcacagggggtccctgtctccgtacttcatactccgtacagcaaattaatgtactcagacccccagaggatgaaatcacctgtcacatagaaatgaaagcccctgagacagggagttatgtatggagtaaggcgttggcctattggatgcgctagcctgaactagcgcgtatgtatgtaatagtttttggatcggcccttcttcacaccttgtacctcttgtccttttgtctcataccaattctctatccgactttgacgcgttgaacccgaaccctcctgggaacatgcagtggtatctgcctgtatccgattagtcgtcacaacaatcccgtttcgacctgatttcaggagcacccctgtgctccgcatacgcgttttcagattcccctcgatttgcatacccgcccttgttcgactgacgtacgctcaataatgtccgataacaatccccatcaccctggcgtgcgcagcttgttagccaagtttgaaggtcaaagccccatcgcctccccgcctctccgtggccgatccccaacttcctcagactcgtcagcaacagttcggcagctgtccaaggtccgggctagctttatcactgtggagggggtcattcagtcgaatccttcttcgccgttgaggaaaacaaatgcgcgcagcgacagtcctggaatgtttggaccgaaaatcaactcggcggatgcggagtcgggacagcagggcatgatctcccccaccgcactcagtcgcctgaaccacacagagaacgcgactctggaacagataatggctgagagtcgaccggcggagtctattgaaaccaagcgtgaacggaatcggactgccaaggaggaacccgcggcgcgcaccgagactgaagttcggtcgcgaaccagcccgcgaaagcagacaggggggtcaacctccgcaggttccaagtcaccaagctccgatactccgtcgcaaaagtcagattcatcagtagtgattaagaggaagccttcttccgttgggtctgcccgcaatgcagccagaaagtccgtgtcaactactgcagcttcaactggtgcgaaggctgcttctcaccatgcaagccccaagcccacagctcgggaagtggctaaagagcgcgccaactctctcgcccacaagcccagtcgtgtctcactgaatcccaagccaacaacagcacggtcaacccgcggctcagcaccggcacaagatacttcaaagcctcatgccgcaggtgtatccagcaagccagtatccaaatccccatcgaaacctgcgcgtgtacccggctcgatgaatacgtcaacacgcgcgtccaccgctaagccaggaagcacagcggctccgagcgctcgcactactaccagtgcatcaaccctcacaagaaaaccttcaactctcaaaggcgcagctaaggttcagtcgcgtgccactactcctagtgccagcgttcacagacaaacttctcgcccttcgttgtccgctcaagcagctagtgatacaagccccaaacatgtcaatgagggtttccttgcgagaatgatgcggcctactgctagctctgcgaacaagacccatccccaggaaaagaccgatgcaaagcctatcgccaggacaacctctgtttccaggtcccccaaggcgtcgtctgggagggtgccagatcgtggcgtccaccaagtgaagcctaagaccaccgcccttcgatctcagagtcagaaatcccaggctctgaacaaggagactgcgccaccgaaagatggacagaaaccttctcaaaagaaacaggagattgagaaagagaacattgtggaacctgaaaccgtgaacctcgctgcgattgcggctgtggagactgcttcccctgctcaggttgaggagacagtgaccgagagttcctctcccatcccagttgaaaatgctactgaggtgccggccgaggtcgatgctcccgttgaggcccatattgagcccatcgctgaggatgctgaggaggataaggctgctgaaaccaccactacaaccgaagagattgcagcagagcccgtggcaatcccaacggctgaggatcaagtgaagatcggcgagaagcaagaatccatgatttccgagccagagctccaaatcgaggctcccgaaaaagaagatgatgcgccagtgaaggaatttactgtccctgaagctttaacggaggtcgccgagctcaagtccactgatgagcctgcaactgaggctgaatcgagcaatgtcgccatcgatattgccaatctggcattgaactagacgctctgaatccgaactgcactgcgttcatctcaaatggatttcgctggtccatctccgcttctggtaaagtcttggaataaccttttaatcttctccgataatactcctccccattgtcttctatctcaccaagcgtgagcccctttccattcgtcgaggcttgccctcaaccttttcaccatctattcttccctgtctatctcttactctatgctagcattttcacatctatcagtgttttgggttgtcttgttatcgtttgtttatctcttgcatactctgtaccaatttcttgagcatattattcttagcgcttaggggcattatccaatttagcatcttgatttatcaatctagcggggctcaaagctttcatactaccattttgacggttcttatttagtcgcttcattttctcatcaaattgagaagctagatgatattcccacagtactgctcaacagctggcctagtaataacaagcactcaattgaccttgaccagcagagatctcttgaaaaataaagatgcagattctcaaactcccaattaaataaaaggctcaaagcttcctctcaagtttcttcaggaacctattcacaccaccttccaaccgctctgccctgtcctccaatttcctcggccgctgtccaggattcttcatggccttctgtgcatatttctgatagtgagagttagcctccacttcagtgggtctgtataattggttatggatatcatattcggagccgaaacgctggtgttgttgttgttgctgctgctgctgcgcctgagtctggtcataggaatgatgcgagaacccgcctatcggcaccgtcggtccagcctgatattgaggcggcgactgggcttgggcagccccatagacgtgttggtcatagagatgggcattcgggtcctgcggcggcggagcgaaggacatggaaccttggcggctggaactgtactgttgagctccctgtccgccaatgaacgacggcgagtatgaaggcacaggcattcccgggctggagctggcggtggagaaagagtttgaatgctgtcccacactgggcggaggtgaggcgaatgatggagggcctgcgtattgcaaccccggggttgaggggggcggggacgcgaatccgcccacgactcctgcgccccccatcatttggtgcgggggcgtatatggcatgccgctgtcggctgccactgcggctgcgaggccggtgccgctcatcccgtcctctggcggcggggtcttctcgcggtgttggattggctctggggcagctggggcggctggattgtatgggagcggggcaaagctagctggttctttcctttcctccgcgggagtagaaccagcgcttagttgttgatcaactggaggtccgcttggaggaggtgggggaaagctgatggtctgtgggagggcttgtgtcactgatgccgctgtgcttgtaggctcggatcgtgagttgcgtgtttgaccattctggtaggcagggtcggagactgcaacggtttcaagttgctggactacagagctcatagtttgctgtggcagcggttctggctctcggtctgtctcgacctggtcactggatagaagccggatgacagtgtccagaaagtcggttgaatcttcttcggtccagaagtagatatccaatgtatgtaggcgagggaaatcgcggacatctttgggcttatcgcgtgggtctccactaggcagacgccactcatgttgaagggtatcttgtccatattgctgttggggcaagggggtgtgagtatcaaccgttaatgtacaaagtgtcgggaattgagcagaatgtcgtatatgaacattgttcaagcccccacagaatgcatcctgttctggagatccaggattattggcaatttcaacccgggacttgttctgagaagcatcatggtaaatataaacataggagcctttatcaaaacggtggtgatatggtgaaggtcttcgggttggctcagtgaaatagtagtggatatccgcaaaactatctccgccgttagacacaatccgagaactgcttcatatcgatctgcggggaagtcagttcaactcacacagtcacaaggcgctcttcgcccgccgatggtggcatgtctgacaattcaaagtatggaatgcaagtatacaacgagagcagcaagtagttgggggaaaagaaaaagagggacttacctttattatttataccttggactgaggggtactcaacctgtgaaacgccagcatcaaccgccatgcaagttgggcgcttagaagatgagtgtgatgtgatgtgataggacggtacttgtacttggctatcacatctatccgctgtgggcgagaaagtaccggtacctggacaagaccgcgacccggaagtaccttttatccgaaaatttccatcccaaatcatcgcatcttcaatcggcgctacaaccacctcctgccgtgtctttgcttccccagacaattgcagtccattgtggtccttttcggtcttccctttcgtgttatctgggatctccgttcttcttctcttccgaaattgttcaattccaccactctctttcctctccgaacggccgccggtagagcttaattgctgccgtcgcgaaatcaagatgtcgctcgtcaacctttctgctgtctgctcccacctgaacaatgctaccaaggcccgtctcgccctcacctctatccccaacagcaacctccacctgaagctctccctcgccctccaaaactccggctacatctcctcggtagcccgcggaggcccgactcctcctccagcccatggcatcctcggtttccctgcagtcaacgatgaggtcgaaggcattgagactataacgcgtgataatgtcgcatcaaggcggctgtggctaggcctgaagtactggcaaaacgagtcagtcctgggcaagatacagatggtcagcaagcccacccgacgggtgaacattgatgtggagggactgcgccgagttgtgcgtggtgagcaatccgggtttgtggccggacttcgctcgccgggtgagagtctgtacctctctacagaccgagggattctagaagctcgcgagtgtgttgagaaaaagcttggtgggctggttttgtgccgtgtgctataagtttgtgattgtcctagtggctaatctctgatttgggggagctacccaccggggagatttgtttctcttcttgcatttactttggagtttgttggttagtcgcagcgctttctcttttcgagattagtctttttgtgactgttgggataatacctgggtcaaggatctgtatattagatgtctgcgtatctcgcattctgtgtgctctgctggtgattttgcagctgtcctcaatgtgacacagtgtatagattatgacttgaaatatgtccgtactccccatggatgtgcttactacaatagagtcgtaatccttctcaggctgattttacagttatactcatgttcccaatatcccaggaatgatatagtgtattaaaggccatgaccaaatcataggcaagaatagaccgccacttgtgcggtctctgttcttcacaatgtaattcaataatcaagtcttatggcaaaagcatccaaagtatgaatatcgacttcactttctattgaatcctgttagaattccgggtctctcgcaagtgtttcgagtctaccggagctttttttttcggcctacaaacactcccaatggtgatccgtccgtctcttgggtaatttacgttcttcgacaattttcatcctttatctcatctcatcttggtcttgtcctctcatgaaggctttgtccccctgacttcagtgatcgggcaaagaactatcaaccatggctaaaccccaaagtgttaaacgcgcgcgatccaatactattggcgatgcccacaacacaacaacgccatcatgggaagaaatctcccagcgcgtccagactctcgacgaacagagtatcgccaatattctcgtatacgcagcgcaaatccatcctgatatcatgaacatggtggaccacgccattcatgtaacccgggagagagagagaaataccatcatcaacttcgacgaggattcgagataagtctggcaactgattaaaatcacacatcgctacgagcgcagttcaaagcagtacgaaatagcgggcgatgtcgttgaggaagtcgtcgataccattgaatcaattgcggaagagtgtggaccttctgtaaacccacagacacgattcaatggactctccgtactgcgcaaaattggcaagacgattgcgctttctaccaatgatacactaggccgtgaggtacaggaatcgttccaatctgatagctctcttgtggatgcgatgataaaaatcatcaattctatgacagcggatgaagtccgagcgatcagagaggataactcaagtccaacagcattgtggccaaaattacaggaattggaaaagctggccgagaccgaatgcattcatcctggactagaagaagtgttggatctattgtatccgatttgaggatgaagaagaaatggatgaagaggaagaggaaggagaagacgaggacgatgataggaaggagttggacacagaggagggtgatgtctatcaagtgccatgagaggcatctttggaattgacctagatcattgttcaggcatcaagaatatcagaacggactttaaatatgaaagaactaaacacaaatctccgaccatttcagttgcttctctagcatcatgtccaatatcatttgaggtgttcttaaggtgatacggtactgttttatgtcgtatgtagttgtgatgtcgcacagttttggcaatccaaatttcgagtttcccccacaccaaagcctctcaaagcttctcatattctcatcctcaacttccaaaatgactgacacagcgaggaaagtcctgatatctggtggcacgggttttgtaggctcggccgtggtacgggctcttgcagaaaaatacccaaactttatcatcgccgtcatcgaccaaaaccctccacgagccgagcacgtcctgccagaaataactacgtggattcaggtggatattacttcaactgaaacattgagcaaagcatttgaggctgtgaagccagatatcgttatccacactgctggagtcgtcccagatctggccgaacggtttggtcgccgactagaacaggaggtatggaagatcaactttgaaggcacacggaatattctggatatatccaagcacagcggggttgaagtattcatatacacgagcagttgctgtgtggtgatcgacgatacgcgtaccgctcatcctaacatcaatgaagaatggccctcggcatttaggtcaaccatttatggagagtccaaggttggaactaccaatcccatcagcaagattcacggcatcgatatgagatatataactaacacgatttgggatggtcactaggctgctgcagaagcactcgttctaaatgcctcaagcagtaaaatggtgacatgtgccctccggccatcggtactatgcggaccaggagactaccagctattaccagctattcacgcatgtatcgccaaatacgaaaccccttttttgatcggagatggcttcaacctatgggatatcacccatgtcgacaatgccgccgatgctcatatcctagccatagagaatctgctatcatctcgcacggctgcaggcgaggcatttttcattcagaataacgaacctatcgcctttcgtgatttttgtctggcaatttgggcgcattttgggcatgtccctccttttcaaatgcatatccctaagagtctggcttacttcaccgggttggtgtgtgagactgtcacctggttgacgggaacaacgacaactttgagccgtggaagtgtacaagatgcatgcgccattcgatatgccagtggcaacaaagccaaggagattctggggtacgaggcgcgcataggtatcgaggaagccatccgtttgagttgcgaggtaagtaaacaccaagcgtaaccttttctattgccgtactcaccaaagcaatttaggattatgcttctcgtctcgggttcgaattgcctcctcaatagtaaaaatcgaaaaaaaaaacagtaacgtccatgttgatggataatcacatatagtttccggatcaccggcaaatgactagggttaaggacatcctgaaaatacttcgctcattatgattttctggggcttgagaggcgttccttggcttgaatgatctcatcatatctccttttgccgtccagggttttgttgataacaaattctagacattctcgaccttggaagatggacattgatacgaaggatgaggttatcactattgggatcagatctgttgcgacgtcgacagattagaaatgactaggggcatcactgtacccaagcttaacttgtcttcattgaaggtgcctcaacctgcacggtcagcggaaatgatttgtgggacgcgtatcagaatattcgcgatatcgggggctgcaagaagtgcggctcgtttgagaggagtgacggatgtacacttaagattgactatgtttatggatgtgatcaccatacttctaagatggcggttatgaatctcatggaggcaccgaactctactcagagtgtgtctatcgatcagcttggacctggggtggtgtatgggagctagtttgagagttttttcagtattttattgagatgaaaagtaatatgattcatagactgaacctcagacgaatagatcttgctgtgaaactgttctactattaaccctgttcgaccacgatgctattactaattgattcagctctctgaagcacatgagaccatcactaatgtatatttttatgattctctcccccgtcatctgaatcactatctcccaggaatcccaccgggcgtaactgcaattcctacgaagagaataccgaacaaaaattcaaagtatgatctcagttgtttttggctcactagctgttgggaaaatgagatttagtatattttatgtagaagtagccacccaataacgtactcagcatttcaggctcatcatgtcgtatcctggtagcagcgcgtgacgattaaaacaaaagcataatatatttgctgcttcatctcttcatccaacaaaaaataagggttgttgagtgcgatgtggcgttttctctttgttttcaccaacctggaacctaccgacactcgtcgcggactcgtctgggcgtcttgttgggctgcaagggtagatcgcatgccatcggaacagctgagctctccacaattggaaaatccggtatctaacttcgtctctgtttcacccggatcttcagaagagtccccagaagggcgagagacatggcccatgcggcttattgcattgggcctcaaaaagcccgagtgcccaacccagattaactgcgcgcgtcaggatttccatttgctacctcgagtcatattttcatttcttccaggaccttcgcgggtgcagatcgcctctatctgcacatttgggtatccataggtcgatgtccaattccagaacccctgtccttgcatttcctacccaacatcagctttgctgcccgaggcattgccccaatacaattctcgaacagatgttggtgcggcacccggcagatactagtgcttctcccttgatccatgaagatcgagactttcgatggaatgtttaccgtccgcattcatgtcatgcacccacagaggcgtctcacggcggctgccaacgagctttacacaccggtcttattcttaatcgatcgagatcttcaaatgtacacagtacggatagttcatgtgttacgcaattgggtttcttgaaatcgacaatgtgcaggcaacacaggcctcatctccatattttgtctccactaacgccactggcgtaaagtcctctagcgcggctctgaatccagttatactgccgttgcatacatccgggtgggctctgatcccctttgtcaggcacacttatcgatttgtccaacccgggaaaagtgcctctaaaaaaaaaaggaactataatatacctcccctttgctcgttggtgaattcatcgagaactctctcgatagatattttcttttcctcgctactcttctgaatcttattctcacttgttatattaggctgtggtactactacggtcttacttccttcatgcttcctgtccttcctcatccattggcggctggaccaggctatccattctcagcaagtctcggttcttgtgcaagctctatcaactctaaatttgatactcggtctctccataggttagcagaatcagcatcgcttctcgatttccgtgccaaaactctttggaatccgaaactcatactccgtagcagcaccatggctcagcaccctatgtatggaaacccagcaaccaccccgctggtctatcaacaaaggtattgtttggccgtcgttcattccattgcaaattcctcccaggctgtcatcgacaagaactgatttcgttccttttgctaagcggcgaaaggtcaccatctactccccacgggtatggctacagagacgaccgtcaagtgcctttcggtccaatggattctaaccgtcaggcccattaccatggaggcccagtccttccggatggccacaacctcatgatgagcccacctgcggcacgtttatcctaccccccagctggaccggtccacgtacaacccaggactcatgaatggagccacccaaaccagatgcctcgggaatccccgaggcgggaccttggaacaatgagcgccccggaaaccccggagtatatcatggaaagaaacagccagcggaccggcgagagatccagaggaagcccacactatcattcccagagacggacatccaaccgggatgaatttgatggcccgcatcagttcctggagccgccttctccacaggctgtcgcagcccaggataaagagctgccccagctccctactaacctcgatgccggcgagcaagacagcatcctccacaaggtcaacgaccgcctgtcccagtgtgcctatgacttcatcgcaaaataccagttccgtgttcccatcgagcaggacaagagacccgtcaaggtcccctcggaccgcgagtggaccgagtgggtatacctcttgaagcggctggctaccacacgccgcatccccgctcatctcttgtacaaccgccaaattaagcagctcatcactgtcctggagaactccctggagatgcgccatgctgccaagcaccagtctaggccagtcaaggacaaccgcaacgtgctgcagctcatttcggcggggactcaggtcgcgaaaatccttagggattctagcgccatgcagtatctcgatagtctttatgtggacaccgagaaattgatcctagaccgacgcggccgtcgtgtaagattcgcaaacacttgaatccactggaaaatggccgtttttaaaccctccgcttggattccactgttcactttttgttgtcttcccgtggaagcccattggattgtccttttcttttctctgctttccttttttccaagtccaatttcggaatactccactgtcaagttttgaacccccttggaggggaagtcttggtgatttcctatcaggacaaaaagagcccaagcagctacccagctcagacgaaggaaggattgaaactcaaccccttcaggctggaaaacgatcgaccagatcgccgcatgtcagaatgtttacatctgccccggaattatgtgacagccagtacaaatgagatcagtaatagggtggctttgtttgttttttcagtttggttcctactttcattccggcgtttgggttggttgtcttgatatgtttttatacttcatgcttcatgcttcatatgtttcccttatgccacacgactatgccgtacgactatgtcatgatttgggggtttttttgttgtacgcagtacgagattatgtttgtgatttacgttgtctacaatttgattcgcttgggtggtccagttctgtttttccctctgctaatattccatacgttccaggttttgggctgcattgttcctccacaagtatagtctcatggctctactgggctgtatgtactacagcttcacccaattgactcggacttttgaagaaagggccaaaaagaaaagacaaaaaatagtttccctgggaatcgaacccagaacctttccggaacacttgcgaatcgcatttgttaacggaaaatcataaccgctagaccaggaaactgctcggccacttgggccaattgatgaatggacaggccattattggcctcatgagtctacaactttgttcccaattatttaggtccggagtaacagaacgaacttgtttcgccaaccttccaacattcgaaagtgggcaatactcaatccacagcggcgagactctcaatggttcttaatacaacggagtattctgctctgcataggaaccatctagacccaatatgaatcgaggatacattttcacttatgaataccgtatgctgccgagcgcatattcgaagctcaaaactacagtaacctgaagcttaggagtatttaccaggtcttgaaactacagtctaccccttgtggcttagatatatgtggctgaacccgggtaaccctatgtcaatacctagtcggccattgcctatttaggtaacaaaaaaatgactacggagtatgccattcgctatattccgcgtatctatggcttatcaaggaatgtcagtcacagccatctttggctttatgaactagattgagtgatataatacaaattattcaacataaaataatcactcgccccttcgagctgttttgtgttgtcttattggcttattgcttcctaccgctcgcgggtacagtgattttctgcctggcaatattgatcaatagtattaagtcacccatggcggctgccgtacctaacttaacttgtagacaagccctgaaagttagaatgtcaaccttcccccatactcaacctctctactacagaccagatattactaggactacggccttttccaaaattttcaaataccactgcatacagatatcgaatgtaccatgttctacttatgaacacgctactaattaggctttgcgtcgtagtgtcgtgtaggtttcttgtggtgccatgagtatgattctaatataataaccttgctgatctttttttatcagaacggcattatgaattgtacaagtaattattatctagggatgacataatatagccacaggagccttggtagctgtatataaacaatatatgtcatgttacgttttccatggatgagaaatgagcttttgatgggacgtattaattgcaaataaatttgtgagatccagtatctaaattaaattcgtgtgtgaaagcgaccgttacggaccatgcctcactagttattgtcagtctgctgcacagagtcaggctcagcagggtagacttggtcaagaatgccacatgggcgcttgaggttctctagccaatgcccttgctgcttcgccagagcatctgccactgctaactcgtggtttgcgtgagcctgcctgttatactgtttagccctctcattcggggttacgtcactgacccagggccctaggtagttagctcccgatgccccatataggtaataaccttagaaaggaagttctgacaaatctcccccaacatcatcccgaggtccatcctgcctagaacttccactggacactttgcgtacccgttccttcttctattttgtctggtcgatcaactttcgcgtgttgcattttcaaaatggcctctcagccgggactcacgaatatggaagccacgatgggctctcgtaaacccacgtcgactcgccccaaactcgatgaaaccctacctacttctcattcccctcaacgcaccgacagcccatcaaccagacttgaaggcaccaaagtgtcgcctgtcaagcttctcactacctcccgagcaggcatgccattccataaaacagcgcccacccttcaatatacaaaccgtcgccgcgacgctgcttctgactcgagctctgactcggggcattttttcaagaccatcaccacacactcaacggttccgtcggagctctattcacgcgatcttgatcactcctactgcgttgatctcgacgacttttctgttccactagacgcgagagtcctcagtgctccatcgttccgacagcttcaagccgcactaagccaggtaagatcaactttccagccccaatcccccgtcgtcccagttcctatatctgcaagacaccggaaaaaaactattctccaaaattaaagaagacgaagagctctttcccggtatacgactgaaaatctcatatcttcgccacgaagtactgtttaaaataatacccggccatcagcacgattcaatcattggcggtttctctcaagccctattgatccagctattcataataggcctttcctatgacaatggggcgttcgtatcccgcccatcgccaagaacccaaggaatgtctgtggctaaggagcctgactggtggctctccccagccgatatctttgatgggtgggggggcgggattccctaccctagcccttgaagtcggcgtatcagaatcctactcccagctatgcaaggacgcccagtggtggtatagcaacttcactactactcgcaaacctacatggtgagtagacgtggaggtatggtccgaaggaccttccccaaatccgtataagacccggagtcacattaatacccctttccgaccaacgtagagagttacgtaccaagatgggcaaatccatggtacacctttggtgctcaacttcgaaagtatcttccgcagaccccgaaatcaacacgaaggggatattatcatcggcatgcagtccttagaagctatgtgccaacaagttctttcttaactatctatcccttgatagcgtggctgttgttgctccctgtgtatggagcatcattcttctggttcgagagaaagaaaaatccaacctacctttaacgcctggcagctggccgaagcccttggcgcatcacgacgtttggcggaaagcatctgggtcggtgttgggcaagcggtgattaatggcggtgagctattatccaatgagagagttatgttccgatggcacatttagtcgccccgtactaggtgccgcagcaccggacaatagcaccaaaatcccccgagtgctgcagcacttgtcaaggcctactttgatttcgctattgctatttaggggagacctacggtatatataccaatttttgaaacattggccctatctttttcttttatttagcggcattataccctcgacatttgcattcatgtaacagttgcccgcaactcgacatggaagttttggcacatgggtcatgtttatcttttagattaattcattcatgtccaagtactgcattgttcaaagattataggacgccctggggcggccgacaatcttataactaactagatggccattccaaggtttaaggttcgatgctaatatagtacgagtaattaagaagaggatatatttgaagagtatgaggcatctattcatctatatatttaggacatgaatatcgacatgagattacattcgaagcaacaatcaccaggattgtttctttgccaaatcctgatttgacaacgaaaatgcatattagttcttcccctcggaatcgattaccactctctgagcctccagactactgttgtctgtttgttcctcttcctccgcctcgagctcgtcgacattccaattgccaaacaccgccataagcgtgaaggggactgtagcaccccatagtgcaaatcccagcgccatctggttgatgttggcccagtgggttgtgccgaccgcgtaggcaatcgtgctgccgatggactcccatgatctcaggatgccggttgttcgggcgatatcgccatctctctgcgctcccttgatctcggccatcaaccaataaatgtatgtctgcaacatctcatagaagaaccggaaaaagatatagacggtgaaggccgagttgaagaaggggccatcacccaagtcgaaggcagggggatcggtcatgcgggagagtttcgactcgacgatggcgttccatgtccaagacgctgtgacaaacacagcaacgaatatgtatacaacttgggatctggttcttcgtgacagaaactttgtatcgaggaataagcccgtcactatgttggcgctggcgccgaccacggctgtgaggaaagatgcaagggctctggagcggacggtgaagtaagctaggttttctgtcagcgatgccatttatcatcaagaaaggaggactggagatgtcatactcgtcaaatagtttccctggtaagttgcaccaaactgtccagcgaggaacactgggatgagtagcagcatgtacttattcgaaagctgcttccagatagcgcgagcctcgatagacatgttcgttttcttcatgtatggaatcttggtgccattctttctgataacgtcttgtggctgagacaacagcaacgcaaatggagcgccgagggatgagatggcaacaaggcccaagtatgttgtgtaggtgaccttgccgacatgcgaagtcttgacattgagagcgagagaaatggcaccgccaacaagcggtcccatctggcggatagacatccagattgccacgtagctaacataaaaaggtcagtcggatacacaactgcatggtccgggagtctcgacttaccgtcctcttttctcctcctctggatacccgactgcaatggcagcctcactagcccatagaagagacgctccaattccacaaagagcggccgcgagcaagagaaaccactcattgccataacgattgttgcagtacagaccagccgcatagggtgtgtagaatgcggctccgatgaacaaggtccatttcgcagtgatcttgttgctgacaccgccagcaaggaaacagccaacggacatgagtccgtatgtcagggcattggcggcattgttcaggtaaggctgcacaatgatatgttagcggtagttgagcagattgtcaacactccgatgacttactttggcatttcctccagctccaagattattgagagcagtccagataccgggttcgcagaaggccactaatcccacgatgacaatctggaatagacatgaccggtaaaagcgggtcacacgttcgagaatcatgatggatgtgagaggtatgcaatccggaaatataccggagacagccactattagtactacatggcgatggggagccaagatcacagaattattttgaacgaaaagaaaacagcacgtcagaacccattataatcgcgatatcttggttttatctctcgccggtagagccccacagctactaggaggataactggtgctcagttgtatactggagacacttgaagaactctgaattagtgtcgaatcggtaatgggaaatacggagtcgtgggagataatcgtcgatatcccgaggttcggaatggtgcaaagtgagccattcgtctccaaaagcacgtaatattggggggcgtgtcgacagggccgggccacaacagacagacttacgagttattttctcttgttgtttgatatgtaccttgtttgaaatatgttgtagtatcttggcaggatgaggtattggaaactccgttataggactttataagagatgttataggctataaaatgtcttggccagtagatcttggggcccgccgacttctctcctatttccttcgaaggactccgtagtcgttaggaattccaaggttaaattagaagcctagaaaatcagacgtttgttttttttttatagttctgttgtagccaaattgccattgtactaacaaatctgcttcaaatcccaagtaccgctaaattacaataatgtacacctaggttaatctaggaatccgagataatcaaaagctagccatctcaatccaactggccacaaatgcgagtcggcgccctcgatcagcagccatacggcgcgagaactcttcaaagttaagtctcgcaccgtgaccacgttccttgttttcacgttccacctggtctaaatagacccaccgagctagggtccggggcgaaggtcggcgtggggcagtgtcacgaggcaggtcattgacccgatgaggaggtgggagtggttgcataggagaaggaggaagcttgggggctgtggcttcggcttctggggaggagcggggagaagatggggcgggaagagagatggtcccgggctggagtcggaaccgatcagggagatcagggtttgtgttcctaattggtgattcctccaagtcggagtctgattcagcaatcacttcctgggtcatcacgaatggctcgtcgggacgatgctgtgggagagttggatcgcagtggagtctttcctcttcaacaaccgggctggatggccccacaccagacgcagaggcagcgatatcatcgccataatcagacgaagtggcggacgttgtggcggattccacaaatggccgtgcttgcccaaatccagtatctcttccgggatcggcgagatgagttggtcgcacgtcgtcatcgtcttcatactcatcctcatcaccctcatctgaaacggtgggccccggcgacggagctagcactggtccggtattctcaggtaccaggactgggctccgaatctggtaaccagcgcgctgtaatagatcatcaagtggctgactgttgataatttcctcgagttcctcctccactgggggattctcagttgtggtgcgtttcgaggggtcctcttttgctgcgagttcaatctcgcgggcccacaacttgcgatcagctctcgtgcgatagacctccatcataaggtcctctttcggcttgaatagaatatctagaagctcgttgaatccctgttgcgtgacttgatataggatttctttcccaacgtccctttcgacctctgggatttcaaagccaccccatcgctcgccaacaggaatactccgggacgaggtggatgggttagatcgaatgtcgtactcatcgtcgttgagatcatcctggaatcgcaccttggacgaggaccgcgaacggaaagagggtgggcgcgataccgattcattaaggtcttcatcatcgctgaagtcatcaatggccggatccctttcataccctgcagggatagtggcgccatcttcttcgtctgtatagaaggcgcggcgcctccaacgttcgtcaattccacgctgacgagcgtcaaacacacgtctctgatcatcttcgcgcattctgtgataaacagcatccgcgacgcgagcccgatcaattggatccgtgatttcccgagcgggaatataggtcccgagagcagaaataatatcttcttcgaggatgtgttcaactgggggccaggtaccactggccaccgacgagctagattggtctgatccactctcgctagcaccatcctcatcttcttcttcgtcgtcttcattttggtcactctctatggcatctggcgggcgaggagtagtctcggcgggtgctaggcgtagtgtagatgggaacaatggcctcattcgactaaattgtgctctgacagcagcatcacccacgaccaaatgccgatcaccagtatcatctccgtcctgtcgcaagattccttcgttgtcaatgatttccatgtccccctcggaattcatgctcttgccttctcctgtgcgagaacgttcacctgaagggatgctaccagggaatgcagagctgataggctggctaccaagtaccacatcacgggctccaccctctaggaagtcatcctccatgccagcaaccatgtcccttgtaagctctcggctcagcgcatagtatgccctgaaaacccgaaggaagtccttgcgttcgacaaagccatctccatcgatgtcgtagccgcggaacacccgtcgcagccgttcgtcgttgcttttgttgttgagactggccaagcccttcaggaattcctcgaacccgataagattgtcgccattggtgtcatagaatgcgaacattcggtcgtaaatgagactcgggggcggcggccggatagaagtattaggcacaaagcatcggtcgaatgttttgcgatcgatggccatatgcaacttgtttgggtcatttgcccactcataattggccaaacagcggaactgatcccagagtgcatcaagctccgtattttcgaaattgcagtctttcataagacgcttggcaagagggcgtggaagactgcgcgggagcattgaaggcttcccgggataccatacaggctgggattgacgagggtttcctaagaatggggctggaatccgcactttgtagaacaaatgtgttttgatatggacctgcattgcctcgcacgtctcacagagatcgtagtcgatgcaattggcacatcggtatctgataccctgaatcggcatggcaccacagctgttgcaagtaaccccacgatggatatagccgtccctccgcgcctgatcctcggcaatatgataaagcaggttaagcaggttttgaccttccctattagaaggatcgttgtttccatcacgccatgagaagacgctctggtcgtccaccaccgtctcaccgccgtcaatattctgtggaggggcagacacgtctggaaaagtggaggttgagagagtgacacgttcaccgttctgtcgtcgccgacgcagctcttcgccgtagttcgtatctccgttgaaccggaccagagccctttcaataccagctcgggagatacctcggcgttgaagttgttctgtcaggtatgttctttctgcggtatcctctgggagaatatgtgcagacgggaaatcgagtgcaaggaaggattcaagaaatgtatcctccatcatctcgcgcatgcgctctgcatgagcaggcgggacgcccacttcttccattagctggtcgcgtgttgcgaggagtgatggaagaagaccgctctccacgcgacgcccatcctccgtctcgatgcgaaatgtcccatatacaccattctgatgctctagctgttcaaggtgggtaatagctcgataagacggagtatcagcgatcccaggttcttcggcttcggttggtctcgtccggcgcacagcatttcgacgtcggagtgaacttgatgatggctgcgagatgacattgttgtgaacatagagaatcgcataggcagcagcgacaccagtgaagaggtagaggataggtcgatatcgtgctagtgagactggccctgggcgcgagtcggacatgacggaggtttggtggaatttgagctagcggaagctgcaaaaaaacatcaggaacacaaggtgtagcgcattctgatcacagctggataagcagatcaagtcagacccgcaaagtgtcaatcaagacactcaaattagaaaggatatgacagtcaatttggagatggcatttccaaggttgaaacgtcaactcgctggttgctgactggagcccggccgctctgattagtaagctatacttgagctccagggctgcccagcagagccctacaacatcatacctacgatgtacgagaagccaaattttttgaaaaaaatgggagatgatatattagctgctctatatattggaagcctatgctcttttcttgatagaattttgaaatagataccaaacttcttttatatctaatatgtcctcggtagcttctgtggtatatatatgcgataaacattgacaattttcaagccaatcccaattctagatagaccatgcactatagtaatttgcttgcaagttttttgcttttgaaagaacacaaatctaaaactttttgaagtatagcttcacctgtgaattagcggttgagtttgctttcacggatgaaacagctgcttaacaaagcgaagaacacgacaaaaaccaaaaaggcgaatcccttgttggtggaccagccatacgagtcccggacaatcctggcagttgctgggtcgagcgttttgataaagtccagactttctcgcactccttcgacaatttgatcaatgttcttactgtcacgtagacctgattgcaatcgattccgtaagacttgctgaacgacagttgatgataaagagagaccaatcacggatcccaatgagcggaatagatatgagcaagcagtgacgaccgcctgatcttcatatgtagcattcgatactggcggattggttagcatatattgaaggattgcagagcaagatcagataaaaactcactcaaaccgatcaaagttgtagtgacaccaatgccattgccgaatgccgaaatcaccatcccgcagatcatcgggactgtactagccaccacaccaccggagaacaggtatatacagaacacaccagttgtcagggaagcatacgcagcaattgtcagccagtaatacttgccagaccatttcatcaacaagcccgcaaacacggacccagtgacaccagctagaatgcttggcagtaagcgcagtcccgcagtcgtggcagagacatcatctactgcttggaagtataatggaatatagaacagggcggcaatccatcccccgaagctgaagaagttgcagctgtagcaagcaaagaatgttcggttgaagatgatgtgaccaggcgcaaagggttcggctgctaggtagatctcaactaagataaagaccacgaacaagacagcagagacagctagcgaggcaattgtcaggggtaatctccatgacacattactgccacgatcaagaccaactaggaaaccaagaacagcgccaacaaggactacggcgccaaggaagtcgatgcgacgcagcttggtcttccaatgggcgctatcgcgaggaggcagcttgagcaggaaagacacggcaatgaaagcaataatgcagagggggaattgcgctagaaacgccctaagtaaaaaaacgtcagatggcgcaaggaaatgtgggtctcgcatcattcataccagcgccagccaatgtagtcggagagaattccacccaagggtgcaccggtaccggcacctgtggcatagatgatattgataataccctgccataggcctcgatcgcgaagaggaacaatatcactcatcaaaatgcttacgacggtggtcataccaccaccaccaatgccttggaagacctgttcgaaatagtcagcattacatgattcagacctgagatcatatgtgaacatacacgagcagcgatcaactcattaatatcccgagctaaaccgcagcccaagcatccaaggccgaaaaccgcatatgcaaagaggaggcacggcttgcgaccaaatatgtcgcttagcttgccatatagaggttggaatgatgttaaagtgagaaagtaagaagtagcaatccaactggtcaggttgagagctttcaagtcgctaccaatctgaccataactggccatgataattgtctggtctgccgccgacaagaaaatctatatatcccgttagtcacaacttcgatttcagaaaacagaatcaataaacattggaagaatccatactccgagcgagatggcaggcacaatatatttgagctgcttctgtgcgtcattggacgactcttttcttcgctcctctgcttgaactgtatcccctgattccacatgatgatcgggaatcgtgccgttggacacagcgccgttaacagatacggatcccagcaacggggagttctcggtaggagatgtctctggagccattatcgagactgtctatcgtcagatcgctccagattgtccgaaagtcaaaatgacttgactgaacgtctacggagaaatcaacaaaagaggagagcgagggcatctaaaccccaaaaagcccccacgtgaagataagacgcccctcactccccgggaccgacttacccgtttcggccaatcaaatgtccatcattcctatgccgctagacctgcaggactttgatctgcgatgacatcgaagtgttgcctaggatatagccctatcttgtacgggctactcatttaatacattacctcacttatagaactatactgataggtcatcgaacggtcgtaaattcggctgttgaataggtatctgaactaaatatatgcaaaatttatttttagttaactcccaattccctaagttcatgctgtcgaaggcatgggaaccggcccaccaggtgagtcaggcagacgggcagtcagcacctcgacaccatcctcagttacgagaagggtatgctcgaactgggctgacagaagtccgtcttgggtggtgcttgtccagtcatccggccaagtgcggtcacggtaggtaccaaggttgatcatgggctcaattgtaaagcacataccgggcttggcagttccaacagccttgttcttggcgtaatggggaatgttgggcgcacagtggaacagctggttaataccgtggccgcagtagcttttgacgacactgcagttgcggctctttgcgtgcttctcgatgaggttgccaggttcgcggaacagcatgccaggtttgacgagctcaattgacttgttcgtacattcacgcgaggtttccaccactcggacggcgtcggggttcgcaagtgccttgtctccaacatagtaggtctcgttgatatcgccgtggaatcccttatgatacagagtaacatcgatgttgacaatgtctccatcctgcaagggccgttgatcgggaataccgtgacagatagtctcgttgactgaggtacacacggacttggggaagttcatatagttcagaggggaggggtaagactaaacttatgttagtgtggtattgcgcaccagagagcaacctctcgtacatcacgctcaatacaagccttgtggacaacctcgtcgaggtagtccgttgtgacaccaggcttcaattcacgagcagcagcatctaaaacctcacgagccaatcggcaaaccttacgcattccctcttgctcctccttgttcaggatggtgatgttatgtcggccgataagtttttgctcggagcgggggataccatcgcgggcatagtccgggtgcgggatcgtcttgggaaccgttcgtttgggtgacagaggatagacgggcctcaaagaaccggcgtaagggaaggacgggtacggattgaaggtaccggtggctggatctggttcagaaactaccttcggaggaaaaaagttggtgaggatgttactctttttgtggatgctcttatgttcgctctagagtatatgatcagcccttgacttcccacataccagggcgcatgtactacgcatcattcagtcccatcatagtcctacgtacccagcttcgtttgaaacagtcctgcgaacagaagaaactgtccgtgccgctcttcagacatgtcgggcattgtagggtgcctgcatcgttagggcagtccacaccccggcatttgcgagtcgcaacttcagccatgttagaatagcaggagtgaaaagaaaaaaaactggagggaatatgtagtgagtagattggacggcggccaaaacttcgagaaaatccccgcgggccggcgatacggagctaaactgcatttggactcctataaacggatgactaatgtcgatcatctcattttggaaggaagggggccgacctcgcagcacgtgatgatgacttattcttccgtttcaacgcgtacctgcctttgttttggacgaccagttaaacttacatgatggctattccaaggcagaaagtggttgttgtgggtgctggcccagtaggagccttggcagcactatatgctgcatcaagaggtgacgaggtggaagtatatgagctccgtggaggtatgtttcactgcctggtgtgacctttcttttcttttttcaccttttggtggccgccattggacacaacccgattgtcaaggaagaacgcatatgtctttggccggggatggctggctttttatccaaggcacaatgtctcgcaaggtccctgtgtcaactctgctattaggagaaacttactccgattaatccatatcaccatatcttccatgccccttgcacttgtcctggctcagttgtgattcattgcgaattcttccgaactgacgccaataatccctgcgcatccgtagatctccgagaccctacgactgtgccattgaactttaccaagtctatcaacttggcgctctccgaacgtggaattacgtccatgagaaactctggtcgggatgatttgatcggcaatgttctccgtggagcgatccctatgcacgggcggatgatccacgggcgagaccgaggaggtctgtgggaagctgcacaggcctatgatgttcacggccgggtatgcaccgatcacctgcttggcagttgctattgctatttacactgcagatcatagctaaccactactataaggctatcaatgccatcgaccgaggaactctcaacaatgccctccttgatgagttggagaaaacccccaatgtcaagctatttttcaaccacaagctcacgggtgctgactttcggaccaacaaagcctggtttgagcgcagaatccccggtgagacacccacggccgacgatgccggtgtagctggtcgagtaccagagatcgaggtgtccttcgactaccttgtcggtgccgatggagcacactccgccgcgcgcttccacctgatgaagttcgctcgtgtcgattatcagcaagagtacatcgacactctctggtgcgagttccggattccaccctcggaagatggagacttccgcatttcgccaaaccacctccatatctggcctgggcgcgagttcatgttcatagcgctaccttcagccgacaagtcattcacgtgcaccttattcgcaccattctcgaactacaacaaactcgagacctcgccacaggatctgcatgaattcttcaactcctatttccccggcgtatgcccagagctaatcgagcccgcggcgttgagtgagcagtttgcagcgaacccgcatctcccactgatcagcatcaaatgcaaacctcaccatttcaacgccagtgtcgtcattatcggcgacgcagcgcacgcagtcctacccttctacggacagggactgaatgccggtctcgaagatgtccgtgtcctcttcgaggaactggacaaacatggagtctatgaccccaactctagcgtctacacacgcggtctcaagcgccaggcagccttccaagcctacacagaccagcgctgtgctgatacgcatgcaatcaacgatctatcgaaggataactatctcgaaatgcgcgccggcgtcaaatcgccgctctacaagctgcgcaagaccatcgaagaaactatcgatcgccatttcccgttccttggctggaaaacgcagtatgcccgtgtcagcttcagtaaccagcgctactccgaggtagttgaagctgttcaaaaccagagccaagtgcttggtcttggtttgagcggggctttggttgccagtgttggagctgtgtccatcttgatgtggaagtaccctcagtatctctcaccggtgggattggttcggtgctcacggcatctggcttgtgtcgggttgaggaccattcgaaaatatcttcatatttaaagctttttttttcgattttgagtggatatgtaacaatgtgcagatacctgggggattcctaacgcgtttagtttgttacacgagaaagtaccttaacatggacagcagactatggtagagagcatgaagtgcacaaaagggaaaggttctaatatccaagtctgaatttttgatcaaactaatataaacacctgataaccatacaacgcttttaatcccaatacctgataacaccgtccaatccaccagtgacgaccttactggactcatggggatgccagtccacacaagtaatagccccaccttcctttccaccagcctggatcttatgatacatcttgccggtcttccagtcccagaagcagacataaccaccgctgtcaccggaaacaaggaactgaccatcaggtgagatcttgaggtcgatagcgtatccggaagtattatgcccaacgaagcgcttctttcggttctggcggaacttgtccgtcgcgctgtagacgacaatctggttgtcgcctgactggaaggcgacatacttgccattcggatggggcgccgcacgcgtgagcgcgaacatgtagggctctgcgatgaacttaatcgggacaggaatgccgtattcccaagcgcgcagcgacttgtcatctgaggtggagatgaagcggcggttgtcatcaacgaaagtaagagtgttgacggcagccagatggtggtcatactcttggaccaactcgccggaccgggtgtcgaattgcacaatcttcttgtcagacataccggccaggaactcgtgtgagtgttctgggctagggttgaagcggacaacgtgcggtgtcttgcctgtggaaaaccggccaagacatttaccgtattcggtatcccagagcttgatctgtcggtcgtatgacccggtaaggaaggtcgtccccgatggatggaaatctgtgtctgagattgctttggtgtggccggagaaagtccgcaagagttcccgagagtgatacacatcccagagcttggctttcccatcggctgctgatgaaagcagcaagtggccagatttggggatgaatcgaagagaggtgatcggcttggtgtgcgatttccaagtttgcacgagttttttgggtacgtagttcttggtggtgccgggctctttgcgcaaatcgatatccaagtcctgaggcacgtgcatgtacgtccggccctggtagtcgtactgctctgatccgtgaaactcggtggtttcttgcgtggcaagatcaccttcgtaagcggtggcatccttactcatggccggcataggtgccgtggtagtcagagtctcgtcttcctcttcgatatattcctcgtcactaccaagcgcgcgctcttctccttcagcaacctccacgtagtcatattgctggtcattttggtatttcgcccagggtcccagatatgcgccctctccctccacaacactggagtcgcccttcttttgccgctttgtccgccagtttgcggacgcgctcttagtcggcttaatttgtacaatatcccggcctccatattgtgccgcattttcgaggcttccgataaattggtccggtagtgtcggattgcgagtgtatcccagactttggaacgtgcgatgttgcgcagaaaatgtggactcgctgatggctgcttcttcagcaaatccagtcggaacattctttcttttgataccgtttcccggacctgctggcttgaacgggttcacagggccctgggaaggctttgtaagatcatcgtatgtggcattgtaggtgagggcttgggatgaggcgttggcgagggccatctgcatatgcgcttggtcctgtaggatcgttagtcttatctgttcgtcatagctcaagtgtaaggcacaaagagattcgggaaggaggatgattatggggggaccaaacctctgtattgacctctggtgcagcaacgaccttggtcgcggtcgtcacagacgagggcatagctgtggcgtcatcatcatcgctggagtcataaccaagacctagtaaggcggacatgactaatatgttaaagagggtgtgaatgcgcagatctcaatgcccctttgcaacaacgtcggggttgaatgtggttgttaaatggtacggagtaggtggtggatgggaattttacgggcgtcgggagacccccgatacgaaggccggggaacagccaccgcagccaagctctttatcagccccaatgcagcttcgacgatagttaagtacgtcaattatgtctacctgttactcttcttacgcatatttgatggcgatggtatttctcaacaataaatcagttaaatgttagaacttgggtatcgtacgctcttcattgccaaccgcatgggaggtatatacaacttcaacaggccgaaagatacaacaagattaacacagaagaagaattaaaaacaaagcaaaagttagcaagagatgcaccaccgcgagtcaatcatacagtatctcgaataatccagctcacatcctcagctcgagacaccccaaagaaaatatctattacctctcatcgctgtagtcctcagatatctcaagactgaaagaattcgttgctcatccgtagtcatggccacccatacgataaggaatcatatcgacataccgagttatatgatatgacggccgtcttggggctgcactcaggttccagggtcgtgcgataggctgagaagaatgtccagaggacatcgacctaagaattttgtgacaacagctcatcggcagacggttccttgatctagccgggagaaccatgatgcatcgcatattcggtcttttcacgcagtcaattaccctcatcacggatcagggcaacaatcatgctgtaaagatagaagaagaacataagaaggtggaagccaagcttgatgaaggattcctaaacacgatttcgagtcagtcactgtgcggtaaattgggaggtagaaaccaaacataccttcttgtgcacgttcaacttgcggaaaatctcggtcgcatccaaaaggtgctggttctcgtagatcctgtattttcaaaaacgacacggttagcctaccgctgaagagggcttgcgactactcggggagcttccaacgtacttcttggcgttgaacaacacgaggggtaggttcagcacgatggcgagccagtatccgttgatcacgaagaggaaggtcaggaacgcgtggacagcggcttcggggatgatgtaggcgttgaggcggttgcaaaggtcgatagggttgatgtaatcgctgggaaaaaaaggtgaagtgtcagcttgtattcggcagtatgtgtggatcaaaaactgttgcttgggacgactgcgaagactcaccattcaagatcactgtacatgatcgtgaagaacacctggaggaagaggttgacggcgttgatcaacaccgacaacaggtaaagccatgcttcgccagacatcattgcgattttgacgttgcgtcaagtataattgacagaatttgaatggctaaacagaggatatgagtaaactgtcggcgacaaaagtgggtgaggttgaggtggattgaagaggccggaattggagatgtttgtggggttcttccgcccaaggaagacagacgaatcgcacagagtcctctccaaagagggatcaaagctcactcacaaaaacaaagctaaatgcactcaagctgatggagatgaaaaacaacgtactgagcagagatgaggtgggatcgaaagaaagagtttcgattagcgaactgcggtcggcggtgtcgggagggctggtcatcattagcgcaacccgcaaacggggctggtaacgtacatgctgtagtccagagtactcgataagaaatagattcaaggtgttgtagtcgaagtaaatattgctgattattgtaactgagttcttttgtccaggtggcaaccttggaaggttggtaggaggatgacgtggaccgtccctcgtggaagtacatgggaaatacggagtagatgtacccaacttcaacgttgtttatttggaggcatgaagggatcattaggcatgtctattttgtctatatacatagtgacaaactatagaccgcagcatacgggcttccatgcatctttaaagagccgatcttcaatccccttcgcaatgaccgcaaaacacgaaacgacgtcggacatggacaaggaccaagtccaacccaagacaaaacacaggatcattgaaaacaccctcgatggtatcataccagtgtatagcaacacgtaaggaccagctcatcgtttctcgacaagtaggaaatgcattgcactgtatgcaatgatgatgaaggccccagaaatgacagccagcccgataacatcgctccagtaggcctgggtgtcaaagccgaatgcgcttaagatagaggcaccgggaacttcaatatccaagccgtacttgtgatcaatcaaagtgaggtaagtcacttcattgacgatcaaggcctcgaagccatagtggaagatggacagctggtaatatggttagtagggaaagcatcactcaggttagagggaaactcacagtctgcaaccacaatgctgacttaggaatcgcatcgtgattcagcaggagaccggcgaagagcaaactgaaaagcatcaccaaactgccgataagattggcgactccgccatcccggaaaataatgccaatgaagaggcaaatgttggctgccgcgagattgaaaaggaccagaaccagcaaaaagcggaaaaattcaggccacgccggaatcagacccgtcatggggtatacaatcatacccatgatgatgggaggaatcagcctcagaggaacgatatcaaacacgactttggacgcaaagtatgtgaccggatggtaataaccattggcacgctcacgtacaaacaaaagccgctccgtggagaacacgttgagactagtcaaagtactgaaaccaaacagagccaagatgaagaagaaaagaccaagacgattctggaagcctttgatatcgtcagtgaggccatagaagaggtatccagataaaactgcgagaagaatagcaattgcgtaatgtgtgagcatcaacatcgggttgcgataaaggttgcgccacgtccgctgagaaaggatcatgaactgccgcaccagaccaactcgggcatagcccttagactgtatcacagtatccgacaatatgggcgaatttggtgaaccgttcgcagcctgggcattctgaacggcggttagaatctcatcatgaacaaaatggcaaacgtcagaatccgcatagctagccaccaaaatgtcgagatcactttgtccagatgccggaggagggagctgatcgggatcatcgaggatttgcggaggaacattgctttgttgacgagaaagacgcagccattgttgatgattatcggctacatccaatgtagcactctcgtcatctgtctttggcgtgactgggcgctcattatgttgctttcgggagtaaagttggcgatcctgctgctgttttagagacacctggcgtttgcttttgggtctccgagtcgcctctgcgccgcttgagttgtcttcaatactccggatcgacgcgctggtgacagacttgacggctctgagactgcttgatgcggtcttagatggaccagtgcgcccatccacagacaacgccacttcgtctgtatatgatgaatgtgcgcctccggcgtgcattgtaagatcaacaaggtaatctgcaatattgaatcccggtggacaggaatagcccacacggtcgaaatactgctggcatgatgagaaaggaccagaatagacagtgcgtccatcagcaagaaggatgagtcggtcaaagagagcaacaatgttcgagcgaggttggtggatggtgaagataacagtgcggttgtatgtcttggcaagcgtcaccagacactcaaccacattgaatgcattgtaggcatccaatccactagtgggttcgtccaggaaaaggatactagggctggtaaccagctcacaagcaattccgactcggcgcttctctccaccggaaatgccacgaccattgccttcttccgagccaatcaattgatctttgatgtgatagatcccaagttgcttttcgacctccaggactctctgctctttagctgcccggctcatatcccggggaagtctgagtagggcgcttgtcaagatggtctcatggactgtcaaggtagcaagcatcgtgtcttcctggtcgacaaagccaaccatggttctgaagtcattatcatcaatcttttcaccgttgacataaaagtttcccttcactgagccacgtttgttctttcgcgctaggatatcgaggaatgaagttttcccagcaccagatgctcccataatggctgtaatttggcctggtatggacgcaccttgaatgccagagagaatctcttttccgtttagtgtataagaaacggtatcccagtacaaagccgcggggtgatagtctgccaggagtttggcagattcgtcgtccgaatcatccgaaagagacaggcgaatataaccgcggcgcgcagcacgacgggacatataccagatgattagaatgaccgcaaccacaaagagtgaagttcccgcgatcacgccggcgatgagtggagtgttgattttcttcacggggcgctcgtatccaggttcatcagtcttgtacatgcactctcctgaattgcatgacaagaagatacttggatcaccgaagacgcccgcaattaatccgttcatctgaggctccgagaaaacgctcttggtaccctccagggtcgatttagtatcgaaagtagccgggcccttgatcagttgatcaaggaaatcgctcaggtcaatcgatccattctcgccacagaggaaacggcccggaatacattcgcactgaaggtgctcgcacttgtagtgagttgtattggagttgtagtctgtttccgtgttccactcgcaagtgtctaggccgcaatagaatgactctttctggtcaacccaaaattggaagctacatgtgtcatcctcagctttgcaggaaaaagtcacttgaggtttgcggccgtcgagctgtttcaagatcgcacggttggtcacatcacacatttgaaagttctccttgaccgtggcaccttgcttataacaaacgcccccctgaccttcgggcatcatcgcgttgcaggcatcatctgagttgcagacattgcagttgatgccttcccagccatccttgcattgacaggtgttggaatcgcgctgcggtcggttcaagtcgtcagccaacgaaccgcataggggaattgaacagtcgtcgcctccaaatccgggcgggcatgagcatttgccgttgaagttattgcaatccgcaaaatgagtgcagttatagttgtcgagctggcagttgaagcaagctggacactcgggacatccgggtggccgatcatcgaagagggagtaggattgcgtagcgaggtttgcatcggtaaattcgctccatgctgcagcagaccccagtaaaggagttaatgtgagaagcgaaagggatattgcgccagtcaagcgcatcttgtggaaaggatgacagcagcgtgtcctagtacgcagcgataccaacaaccgaggaaggagtgcggggcggaccgccgaattgatcaaattagagaataaagctggagcatatagctgaagtaaaagatagagacaagttcgaaggttgagaagcagaaagcggagagattcagagggtaagattagccccaggcgatgacgcgggcggagaagcgagaggaggctgggcgtcaggaaccaacagtcttatgctatgcaagaccgaccccgatggtttttcattctacatcaagatactagataattacagcaacatgctagataattcgtaaattccaagctttcccaccacagcattttttccttcccatttctgtatacaacataagtggttctacctcaatgcggggaaacacgtgatgccgggggatatataccatgtcgaccagtttagaggacaaaaagcaaaaaaaaagaagagaagagaagtctatagaaagtagctattctttgctacaactgattcgtagtcttttatccacgagcgccgaggcctgggacgtatgcctcaagcttgggcaatcctcccaagaactgcaaagtgtgttgttagtagatttgtatgtcgaattcgttgaatgcaatttctgatagagttaattcccttggttgaacggattaaccgcaacaaggatatggagcaaaatggaatctcctttattgcacaagatcattgaaagaccaccatcggaacgtaggcacctatgggcacctatggagtattgccctaatagatcagctatgtgccgggaacctccgtgaacaaagaaatagggcggggatctgttcctcgatacttgctcggtagcaagtcctggacgagtacatatattacgaaagttatggcccgcagtatgcaaacttccagttcaaaggaatcacattcattttgctacccctgctagggctacaaatgccacgtcactagcagagactttcaagctcgcccgctttttagctctattttgaatgcctcgactaggtactcgaatttaccgccagataactggaataccgtcctgaatctttagctacagtaaaacaacaaacagacagtgttgaaactttccttgaccctcaacatgtcgcccctagacaaacgcagaaacagtgagatcatacacaagctggaggctcgcatagtcttccacagcctcaccgatgatacccatgatgagacactgctcaaaccctacactcaccacttagcacgggcatgctggaacggtagtcggatcgttctccgtcagacttcacaggaagcggagggaatatcgaccttattatggagctacatagtgcatgcaacgggcgatgggacgattttgggatcgcggcatagagcaggatgatctcgatacatggcttgggtttactggcacgtttctgtccaatcttggtaaattttgttggtctccaccgtggcttgcaagctttccatccatgacctgaattgctgatgtcgcagtaaaaggatgacggagatcgtaaggctacccctggtgtttccaaagataccctgcgcaagatagcgagcatatcacctgaggcaagcgcaaagcttgaggaagtccttgatccgatgatgacagcccagccggctcaacttagtatcgtcatcaaaccaaccagtcgagttactaccctggaaaagagtggattacaaaggaagagatcgagactgccaccaagataatggaaaccaaggggctctaaccatcagactcccaccgctgtcatatataatcgcccgttgcgatttaagcaatagcggtgtgcagcgctgtctggtagatctactatcccaccctcagctcaagcccaatctgcgcacacctattttcaacgtgcatgtcctccactttgcaaccgcacatcatgatccagaccttctttcatggttggcagcttccatccccggtggacttgtagtgcggggacaacggccctaggacatacgctactccacattgcttcgttacctttcacttccaatcagactgcactttataatccagatgtcgcggacagtatacattgtgcccgcacccttgactctaggtggtttcctcatagaatgccaagccctctgcatatccagttcccaaagccacaggaaggctcccgaaaaccacagccactgacggattcccagcaacaggcacaaaatgcaagtattcggcttttattggaatggggagggattgatgtcagggcaaaggatatcgacggcaataccgctttacattacttagtgaggatattgttgaaatggttcgacaggcggatggaggggaagaaacgtgggagaacgcgacaaaccgccatggcattactccacgacagatgtggtgtaagtgagatgtaaggcaaagatgacaagggaaggaatattagtttcagccttcaatttcatgccttgtcgtcatcgtagaggatgtcctagtacctcttcttttcggcatactggcttaattgcttgggtgagtatgaatgtatggataggctcgaattttattaagcattttatattttgcttgcctaaatagaaagtatgttattccctgcatgtgctggatctcattttaaatatattgatccaggtatacaattctagaacctagtttactggggaaatttccacaacttttgtttgtgctaagtcgaggccgggatagcaatgtaaattcttcccggcaggtgtgaagcagcgacttcgcgcaccacgtggaccaggcttgtacgggaaaatatccaagctcttggaaatcctagtcatgaaattcagttgaggtcattttctaatacttgaactatcgatgacattctgatatagcataatgtagggcgtgtgagaacaacctgaaaattaatttagacctagaacaaattccaagcacgaacaagctaacgcccgatgaacgacctcgacatatcaatcaatctacgctaaggtgaggctggatcgggaacacgatccatcacgtgataacacggacagctcataggtagagcggcggtagcataagggaacaagttatcacccattcagccgaacattggaacgtccctaggcaaagagagttgattatagctacttcgctcggtaattcccactattataaaccatggtgaagattgaggccttcgcggttgaacaggtacctccccgcattaccccatggctgggtggtacttgtctgctccctctgtcgttacagatgtgttttgttaaccgtcctgcagtggatggacaagtatgagaccactgcgaaatataataccgccgagacctgctgtgcatccatctccgtcgacgatctccgcgcgctctccgatgacaaggagtccaaccctttagcccagcttcaatccaccaaactcacatatggggcgatccgtggctctgataaactacgaaatacactggcgaatctgtactcggtaagggcaccgacgcagttgccgaaggaaaatatcttgatcaccgctggcgcaatccaagcgaacttcttgctgttgtatacgttggtcggcccaggagaccatgtaatttgccactatccaacatatcaacaactgttctccgtccctgcgtcagtgggggccgaagtcagcctgtggaagtccaaagaggccgatggatggcagctggacattgaagagctgaaaggccttatccgacccaacacgaagttaatcatcataaagtatggatttcctgactcttattacaatcatgcaaggcgtgcttttttttcctgaccatcattctcatagcaacccgcaaaacccaactggagccatcatcccgcgccagactctccaacaattggtcgatattgcccgcgagaaatccatcatcatccactccgatgaggtctatcgcccacttttccacaacatcagtcccgcggatccgaggttcccacccacacttctttctatgggatacgaacgcacggtggtgacaggatccgtttccaaagcctatagcctggcgggtttgcgggtaggctgggttgcgtcgcgggatagttcgatcattgaatctgttgctaacacgcgcgattatacaaccatctcggttgggcaaattgacgaggcaattgccggttttgcattagcaccgcattgcattcacaatcttttgaaacgaaatatcgatctagcccggactaatctctctattctagagaagttcatcgatgctcatcgctgggcatgtgagtggattaagccgcaagccggcaccactgcatttgtgcgctttaacaagatgggaaaacccgtagacgatgtcgctttctgtgagatgcttcaggaacggaccggtgtgatgcttgtgccgggaagcctttgctttggagtcggagaagacttcaagggttatgttcgcattgggtacgtcaatgaaaccgaggtcctggagcggggcttggatgccttgggtaagttcatggaagatggatatgaggatgtaccagtgaagaagcccttgcaaaagtaaaaatagccatcccgatgccactggtcaactggacatgcaaactagccttttgtactctccggcaactactagccgagcccgtttgtataaagaagaatcataacaatgtcagaacgatctacagaatgaaaaattaaatcattattgaaagaaacaactgccgtacaacgtgtatgtggcgaatacgttgcacaatgttgcatgtcgtcaggggatcggcacatcccgaggtccgtgccgaggcccgtttcgatctctcctactccggacatatctcaaccttaccggatccattagatgaagtcaaccaatattgcttttgatctgtgatccaataaaaggcagcgaagccgaggtatcagtcaaagagtccctataacacctcatctgctcttccttccagagctacattcaaagccgtgatacctaaatatcatatccctcgagtacattacttgagcatactatcgatctcactcctagatcatatccacttgagcttgatccttgaatatcttggtcataatgccgctgccatctttgtccggtaggtcataccccatggcgggactgaatgcatggctaacaagcggactctttgtgcagatattcccttgagtcttgcactccctgccgcagcaacgacactcgcatatctcaacgcaagatggtcggtttcttacgatttgaacctcctcagggggttgctgaagatgtccgcaaagtcccgcattgccgaacgtggcgaccgcttgaacctcttctacacacttgaagcctacgcactcgatcctaaaactgcaggaaacgatttcattgtgtacaatggacgaacaacgacgttccacgaaggctatatcatggttcttcgctacggggcatggttcaagaaagtccacggcattaagcgcaaggagattgttgcaatcgacttcatgaactcttccaccttcatatttatgctgttgggactttggagtattggagcagtcccggcatttatcaactataacttgtctggcaagccgctcacccactccattcgaacgtccaccgcaaggcttttggtggttgacgaagaagttcgtcactgcttcccggcggagcaggagcagatattgacatccccgaccttccgtgatggcaagggaccggttgagatcgtatttcataccccggaggtggaagcgcagattttgggaatggagcctacgcgagaggatgacaaggcccgtagtggcttgattcctcgcgatatggccatcttgatttacacaagtggcaccaccgggcttccaaagcccgctattgtcagttggaaaaagtgctggtctggtagtttgttcgtcaaagattggttgagcattacttcctctgacagattcttcacggtaaggtccaaacttataaatgttactgcccaagctaacctcctgtagtgcatgcctctttaccatagttccgcttcgatacttgggttcataacctgcttgatgagcggatccgccatgatcgttggccggaggttctctgcgcgcaacttcatcaaggaggctcgcgagaacgatgcgacaattatccagtatgtgggcgaaacactccgttatctactaggagtggcacctgcaattgacccggtcaccggcgaagaccttgacaagaagcacaatatccgcttggcatttggaaatggactgcgtcccgatatctggaaccgcttcaaagagcgttttaacatccccacaatcgccgagttctacgccgctaccgaaggcactacgggctcatggaacctttcgacgaacgacttctccgcgggtgccatcggccgaaacggtgctttgggagatattgtccttggtcgtggctctgccatagtggaagttgaccacgaaaccgaggaaccgtggcgtgaccccaagactggtctctgcaagaatgtcccccggggtgatcccggtgagttgctgttcatcctcaatgcagcggatcccactgccaatttccagggctacttcggaaacaagaaggcgacagaaggcaagattatccgcgatgtacttaagaagggtgatgcctatttccggaccggcgacatggttcgatgggacaaagagggtcgctggttcttctcagatcgactgggtgatacgttccggtggaagagcgagaatgtatccaccagcgaggtttccgaggttctgggcgcgcatcctgatgtacacgaagccaacgtttacggcgtgactcttcccaatcatgatggccgtgccggatgtgcagccatcctgttcaaccagcaggtagcaagcggtaacctctctgataccgccctggaaccctcgcgtgaggtgcttgatactctagctgcgcacattctcaagaacctgccccggtttgcggctccgctgttcttgcgggtcacgcccctgacgcagtcaaccggtaataacaagcaacagaagcatgttctccgtaccgaaggcgtggatccagctcttgtatcgaagaaggaccgactgtactggctccagggtgatacatatgtccccttcggacagagggattgggaacggttgactggtggtcaggttcgcctttgatccgtctagttttcttggacttgtctcgtcttgtgtgtcacctttgccttgtcccgttatatctctaagatttttcggtcctatggcctgattcgtagcctcattcaccttaagataccctcgacagccttcaattcaacaatctatatacgcccattggggctgacctggtatcactgggctgagtttacacgtaggacatacaagaatagtcagtgttctctgcccttgacgatgtaagactaagataatctgatctatttagcccaagatgacctcggaggcgttacatgtgtttctatatgtctttttcgatgtatacgaaggcggcaaaacgatatgtatgactgttggaatcatggacaattatcttgcctgatattcttttcctggcctcgggtcagcttagtaggctatgcatgacgtggaactcggtaggaaatcccgagtcttagaaggcacggcaactatcggaaggtaccattagaaactgacaggaagggactgccctcaggcaagagcgttgggtttatgcctaaggaaggaacgataaaaaagtgagtataaagggaaaggtcaacccagacattatagcccccaactcccatggctcagatgggatgcgccctgttcctcgagcaggctagctgctgctgaagaacctttgggcccatcttttttttttatcccgttccggatcatttgaagctattcacacttctggcccaccataaccccaccctcgcaataactctttcagcgtcttttcttaatgttttcacaacaattatagtagaccgcttacggggccttatcatgctactttgggggtcttcgtagatatatattttaagaagctgtatagccttggacatgctctgatattgctatgaaagattctggatatattcttctttcaagggaactaccccgcagttctcttaacgttcgacttgtcaaactagttgaaattgtccaaaggcgaatcagcctcgacaatcttccacacctgctcaatctgtgctactatttccgcatcgagcggacccttgctaattgcagcaagtgtctgattgagctgctcgacattacgtgacccaacaaccacagcatctccaagttctgctttgaggtcggagttatgcaccacccaccgatatgccaattcggccttggagataccaaattccttggatatcttctcccacttttccaagccctccagcatgctcggcttgttgaaaagcgcattgtagatcccaccaatctgtgtctttggatcccaccgaccctgcccaccggagaccaacgtcgcgacatccttagtcaggaatcctcctgcgatgggcgaataagcatagaatgagatgttgtgtttccgcagtgtgggaaagatctctttctctgctcgtcgtgcaacagcggaatagctgccttggtagacacttggcacgacataattcttttcacagcagatgcggaccacctcttcaacctcctcagccagatagttggacagcccaaagcgcttgaactttccagccttgtgcgcagagtcgatactggccagcaggtcttccaatgagcttctgcgttcgggagcatgcatgtagtagatgtcgagctagaaataggattagggattgggtctttgcagcctcagattacgaaagaagctcacctgattagtttggagaagggccaaactctcgttcaagcttgtaacaagagactctggggtggagggctcaggtctaaacccgccagggaatttcgaatcaatggcaaagcgggaatcggcgtgaagtttgcccaatagctcctcggagttactgtagatcttggcagtatcgatgcttttgatgcctttgtcatgcagaatatcgaggacctcgctgatggactcaagagttggataggcggcttgatccatgattgaggctccgccccagacaatcttgatgctagccatgatagatggttattgaaggatgaaggaaatatgaatgtctaaaatcagccctgacaattgggttatttatattccatttcaagcttacaatgctatagaagatttataatcaaagcttcaaaatcaaaaacctcatacaagtacaacgcacgaattcatccgtccgtgggcgtctcgtctcccccggggccgccggggtggattattcatcgtaatagtgcctctcacggtacaatagatagtcttatacaagcttaagatagtatatgagagctatataggttatttgacttcaattaaatctcactaggatgggggaatccagtaatccatctgtttggcgtggtgagaattataaagtcctagcaatccaagtttatacataggaaagccgtttattaaattgcgccctttgcacctttttccgtgtacctaagaaggaggagatagtcacagaaaatatactaatgaaaactactgaaaatactaccaaaatgtcatgcaaaggccttgtccaataccattctacggggtcaagtatagagccgactcgggagcaaatcggcttccccgcatgcatttggagatccccgctgtttatttccttctctgcttttgtttttatctctctcctcaacccatcatgtcttcaaatttgtccttactcacacaccttcgcccccgcgtactggcgcgaacccgaccgggcgcaattcgcagtttcaccatccctcagcgtctccgctcagatgcttcctcggtagcctcggccttcttgtcgcgcttccaatctctagggccacaaacccgcacgcaaacgatagatgcaaaccagctccagcttctcaccctcaccctcaatcgcccgactctcttccccggtgccccctccctatcgaatagcgctcccgctccgcaatctgcagtacccgtgccgccgggctatcacctcgcgtatttcacacccgcgttcctggaaagtgaacttggggcggatggaaccgatgtgtcgtataatcccgacgtgcctttcacgcggcgcatgtgggccggcggcgaggtgctgtggccccgtgtggatgggaaacccaatctgttacgggtaggacagcaggtgcaggagacaacacgggtacttagtgcggaggccaaggttgtgaaaaagaccggcgaggacatgattgttgttggagtcgagaaagaattcgccaacgagcacggcgtgtcaattattgaccgacggtccggcttcccttttcaagaatcccgctgttcaaagtactgacaatatcattcacatagcaattgggtgttccgcaaagctctacctgttccatctgcgtcaacgtcatccagcgctcttccgtccccaacgtcccatattgcgaccccaaatcctacctcgttcgccatttccaccgagggcaacgcccatacgcgaacactggtgcaaacgccggtgtcccttttccgcttctctgctctgactttcaaccctcataagatccactactcactgccctgggcgcgggatgtagaaggacacaaggatattgtagtacatggtccattgaatctgatctgcattcttgatctctggcgtgacacgcgccagaatgtcaccgattctaccttggttgttcctgagcgcatctcttaccgggcaacgagtccattatatgccggggatgagtatcggattgtgcttgaggacggcgagggaacagaggtgcagattattgggcccgggggagtagtggccatgaaggctgagatccactaaatatgaactgcacaaataaaccaggtgtagaactgtggtggttacagtttgggctattcctgataaaatcgaaggacaaaaagctttggggcgtgtagatccccctcacgggctagcgaatccacttcttttccctttttttacctgcgatattcgtatttcctcatttgctgatcgcaataaccacaaacaataatgaacgaaccttcggaccctgatgcagagacatccgcccccaaaaagagaacacgggtgcaattttcgtgcacggcgtgcaggtatcgaaagtaagctcaagttcaacgcatgacgtgcatacatcatacctagcatatcagatattgatccactacagattgaaatgctgccgcaaccacccttgtaataattgcaagaagcgaggcgaggccacatcatgcacctatgtcgggcgcggaccacgagccaaagcccagcatgggcgctcgagcccgactctggtccaggaccgcctgcaccatctcgagaatctagtgatgtctctagcacagaagcagaggtctaatctcaatgttgatttcaattcagtgcaatcgggggatcgggatgctggcgcgatgcgctcacttgacgctgcgttgactccggttgacacgggcacgctggtcgtcaaaaatgagggaactagttatattgacagtgcaaattggcgcgctatcctggaagaggtccgtattgatctaattattgctgttctctgaaatggttgtgttgacgggttcttcaaatttgaagattaatgacgtgaaagaatgcatcggagaaaattccaacgatgaaggcgtcgatattgacccgtacgatgcctcgtcaccagttctactgcttggtaatagtcgtccggtgagcaaagaggagatgcttatggacatccctccacggtcaatagccgatcgcctggtctctcgattcctcaagacatctgaaccggcacgaggtatgagattctcaaggaaaacaacaagtaccgagtactgataagccagcagtggtaattcacgttcccacgtaccaaaaagagtacgaggagttctggctacacccagcagataaatcatttacttggatttccctcttatactcgatcatggctttgtccgtctctctacatcatcgaggctcagagcagtcgccttctaccatggaagactctatcaattcatgggccatattccggaaaaggtcatcgcagtgtcttatccaagcaaactacatcaccccagggcgatacaaaggagaagcactattactctactcactcaccgagttctaccgtacccaggatgcgcagattggaatgtcctatttgcttgggattactattcgcctggctatgcgcatgggctatcatcgtgatccacgtcattacccaatgttatctgccatggatggggaaatgcgccggcgtctctgggccctgctcgttcagcttgacaccatagtctcattccaagtcggtgtccctcgaacaatccagccttggcaatacgacacagagttaccttctaacttgtgggacacggacttcgatgagagttccgttcaattgccacccgggaggccggataatgaaggaacagattgctcgtacatgagggccaagtctcacgttatgagtgtctttggtcaaataacagacctggcattctcccaagagcgctcatcctacgatgagattttggaaattgaccgtcgtttggagactgcgcatgatatgataccctcgttcttgaaagttcgaccaatgacgcagtgtatcgcagacccagcagaattgaccacgcggcgcttcgccttggagctcttgtatcaaatagcacgtcttgtcctacatcgccgctatatcgctgagaccaataccaaatttgcttactcgcgatcagtctgcctggccgcagctcggcaagtgcttcaatacaacacagagatctggtccgagttcatgcccggcggtcagttgttcgcagcgcgatacttcctcaactccctccaaaattcctttatactctcggcaatgattctttgcctcgagatgtcccaggatgcagatcgtggtcatgcttcacgcctcgagcctcgagagcgagcagaattcttgcttcttctggaaagtacccatcgtatattcatggaaacccgtcaccggtctgtcgacacacagcgagcagtgaatgctttgactatcatgctcaaacgagtgaagaaaggtgactcccaatcttccagttcgactgctgggcaatcaatggcacctatggatagtaagtattacttttctcttctcgcaatatcatgctgattatattacccagattatatcttaacccaatccaccagtgcatcagtccttgatcaacaatactcaacgtacacatccaatattagcgaattgcagtctgcaatacccaaccccggccagacgtcatataactccctgggggtcattgaagacatgcttgatatacccgctcaactcgactgggtaagatcccagccatgcttaacacaactaggactaatcctttatttccagaacctgtacgacagtcacatatcagcagtcgaaatggccaccaataacgacatttggtactctggtggtccagcaattccgtatgatttcggcgcttatcctcctgggtcatcgtcgatagatcatgagagctatcaatgacaatgtgaactatacaagaccatatcatcaatacatatctcgtaaaaccaatatgtttctgattaaaagaaaggtctagaatacaaaatcgaaccaaatccagagagtatgtactgagtatgcatccaccgagagtatgcatccaccgatcttgccgaggcggctgcagatcccgctccgcggaaccggagcttttttcttgtctgccaggaacactacactccaagcaccaagccgtataaatcttcttatataacctcctaaatgcaacccatccgcacctcgcgacttctgagtcgcgcaactctaccctcccaacgccagaatgtgtgcgcagccccccaccaactcaaggcaagcacgaggacaataaacacaacacaacggccaagtctgcgcctacctctactccccagcaatggcaccaaaaccaccacacgagcatttggcctgcctgacctatcctccttcctccccaacagcaacaataacaaatccccacaccgcgtcctaaccgccacccgcaacctcccctacaacccaaccctgctatacaaagtgatctcctcggtcgaatcctacagccaattccttccgttcctcaccgcctcgaccgtgacagcgcgcgatcccgaaacggggtccccaacacaagcgttcctgaccgtcggctacggcccgctcagcgagacgttcacgtcgcgcgtgatctgcgacgtcgagaagctgactgtggaggctaagagcggggccaagtgcggtcaagagggacagggtgcccaggctagtaagagctcttcttcgtccgggctaagcgggttctttcccggtgcgaatgagggccttttcgagtacctgactacgaggtgggagctggtgccgatttcacctgctgggacgcagggtgggccgttgactaaggtcaatttggaggtgcggtttgagtttcgttcgcagatgcatgctactcttatgagtgctgttgaggggcagatggccggggttatgattgaggcttttgagaagcggatgcgggaggttgagggtaaagggcagtgaagtgtcaattgtagattggattgtacattagtggagttttcgtattcgggcataaatggcatcacactacatatgactacttgttagacttgcatctcttcgactcttgacagcggaagggaaatagagagcatcaccaatttgattctattggatggatcgctgtacatgctcaatcagaagcctgtgagaatgagcaatgagaccaaaaaaaaataaaacatgatagtatataatacagattatccgaacacagaaatgattttcaacttaaagcatgctcatactccgatgacggttgatagagttgcgtgagttcttcatcgagccgacagcattgtagttatcgaagaccacatcccagttaatccgatcccaccagcgctcgaggtactcatcctttccggcaataccgtagtccatcatccacgcgtgctcccatgtgttaacacagagaataggctgcacgtcgacggcaccgggcgcgaggctcttctggttctgggcatgggcgcccatcgaaccggcgaactggttgcccagctgtgtctccggggtgtgggtggccatgtcgacgggctgccgccgggagtgggcggccgggtagggcgagccggcgctgtaggtgcagaagatgtgcatcatgccttcgcgctcgaggttcttggcgagccacacgaatccggggccgaacattgagcttgctgtggccaggaaatccaacttcagggactcgacggaggagcaggtgtcgacgatgtccttggcgaacttttcggggacgctggtggctgtgggggactatattgggcaggctggtcaggattgaatatgtatataaagggatttatattgctactcaccaggcagttgaagaaaaagtggttgttgtgggccattgaggcatagttgaacaccgaggccatctccggacgcttggagtatttgaccagcaattctcctggtttggcatctgcgtcgacggtatctattgatttcggttgttagattggtatctccgtgtgcaatatcgctcaattatcggattggggccgaattagatcaatccatcgttccacagggtcggagtgtcgggctcaccttgtgtcaacaggttgagtttgttaacgagaagactctggtattgggtccatgagaagtcgaacgcctcaggcgaaaggaactccggaacaccattctccttatagtaggcgtcgtgctgcaattggggaatgcgatggatagcccgagtctggaagcgtgagaaggcggaggtaggtttctggataaaacgcggtcagtcaagacggattgagcggcggagaaagtaagtctcactggagagaaagaggaggctgcgcgcaaagcgctttgcggccgggcgaatcggttgaacatgacgagcggcactatgaatggtcgggttaatcatacagagcttcgctgtcgaagaatttccctcccgacgttctgcccgatcgggattagtgtggttatgtaagacccctggcccaacagccaatcacatcgtccatatctacttcatctctctaagcgccttgaactattctgcacccttggccttcgtccaatcctcgtcctgcaatcccctggtccgatgtggtactgtaacaaagatttgacttagcgcccataatttgccattttaatcatgccgctcactctgaaacagcctgggtgctattttaggactgcggcgcttgcaagtactctttgtctacaggatgacagtgctcagatgcctttcaataatgatatatcctggctctttgactgatttttgtttcagacggaagtcaatgcctttgtctgtcagcaattgtcaatctttctctgtcaaggttccttctgttggtctatctacttgcttgcgttatacgtgaagattctgtcaaggacgctatcagtctatatctttcggaaactcctctgaatttgaccgtcaaatactttcattcttctcggcctacatactcacgaccagtatgacgaggtcacggccatccgttctactgctcttcaccctgatggcaagcatccaaccaggactagcatatagctctttcgatcttctctcaagaagctcagacgcttgtccttcctcattttctcgctgcggcggtacgaaacttccaaatgatttctgctgtccctcagactccacctgcatcagtctagatcaaggcagctcctccatctgttgtcccgccggtaaagattgtgactatatctcgccgattacatgtgatatacagctgcagaatgttactatctacccggagagtgtcatcaagacaactcgtctgggcgatagccttcccaaatgcggcgatgcttgctgcccgtttggctacacctgccagggggacaacacttgttccctgaaccaaaaaacctccactactgcaacagaagctttatccagctcctctatcactacaacatcatcatctgtttctagctcctctaccaacacagactcctcatcgacaacggctacaacctcaacaatctcccaagcaactatcacacccgtgccatctccatcatcgacaacgggtacaacctcaacaatcccccaagaaactatcacacccgtgccatctccctcatctgaaaaatccacaaactccactacatgctcagcactatcaacctcttgtccctccttcccagctggagctctagcagcgggcttcttccctggtgcggtcctcggtgctgttgccgccctcttaataactttctgtttccgccgtgcccggaaagacgaatgtgaaatacaagaaggcaaaaatgggcctaattggtcccaacgttcttcttccggggcaagattgtgcatatcaaaccccataccccaagacgatacctcgtaccgcacagacttcctccgatgcccaccacgagccaagcgctcttcaataggaggacgttccactcgcactgtgatccaccgcaccggcagcagagtgcggagtctgttctccggttatccaaggcaaaccgctcgactagacaaggatgtgccacctatccctatgccaaaccctatgcatccggctccgtttactccgccacgacagcgtcagccgagcacagaaagcatcacggtgtattcaccgcctgaatcgtggctttcgcaatctcgcactttgttgggaccaagtccataccctggtgataccgctaggccagataccctgtttagcgacctgatgcgggttgttgggtctcctcatgatggcaagggaaagccaccttatccgactaatgataattctcgggaaaatccgttcagagatcctgtgcgttgataattgaaggatgtgaagcctacggggttggattgagccgtgcgctcagtcatcttggttcagatatttggtcgttctggcatattgattgtgtgccacgcacgatatccatattgtattgtttcccactttgtttcgaggtacctgattaattctccatctaattcaaatatagtgtaccgctttatgtgcatggtcaatatctatctacgaacagtgacacaaggccctgggtaggtatatcctcagaaggaaaaatagttcaatgggtgtatataactcctagaatacataaatttcgtattactctacgatgctgccccgttcgccttacgtcgagccgcaattctcttgagctctttgagcaacccaacaacaagagggacaccaattggtcccagaaggggtagatagacagccaccttgtgctcatcggggaaatagacctggcccaccatactcttttcgaagaagctgcgctcagcttctgtctctgcgactcgggcgctggcaagtgcagcgccgaagcgaccctctcgcaagtggacacaagaggcactcaaatgagagagagtggtggagaccgacgtagccacggttgccgggatagggatggagggtaaagacttagtaagacgggcaagcgagcccattgttgatgaggcggagagcaacaagctggccgcgcggatgcggatagatgtctgaagacggagtggaagagaggcaggggtgcttggagtgccgaggagggtcaggagttgatgagagaaggtcatgaatgcaggacctaaagagtccagggagaggtgggaaggattagacggggcactctgctcgccggtgttggaaagcggcgggttaagaaggaaaaccccgccccattgggggactatccaactagaagcacggttctccttgacaatgagtggagactgcgaagggtctgggacgtagagaatgaaattgatcgtcgggccattgccgatgctcgggttcagcggccactcggcagcattgacgaaggcacttaaaccttctttcttcaatgtccatgccgcctcggattcatcatactcgggcttcggcgcggtgggtgcaaaattggcatagagctgtacttgcgtgtcgacagtgaaattgctgataggagacaatgcctgcaggaggggggagacatattctttcaccgcagcctcaatgtcccacgaggacggttcagacccgggggtaaagagtgaaaaggagaggtggtaggtttcggcatatttcatcgatcggcgcagtcttcggtcgatatcttcggcgagttgtggtgaggtcgagtcaagcccagcggtatttccagacaagatgtgcgctatagtagccttttcctcgccatataattgctgaagctccgccgcaatgaaagtggagaggggggagttggaggaagaaggtacggggacctggctcggcgggtagaagatatcgagctgtgtcgcagctgcatgaagctccgaccaaggacttgctaggccatcctggggcagtaatcggacggtcagtgccgtatccgctgtctctttcgcagggtattccaggttgtcttcgccgttatgaactgccgtcgtggtgccgttggtcaacttgagccgaaggtggtgagctgcgaactcgttgaggtcatcgagagtatgctgcgtcgtgcggagaaggtgctgggcttcgaaagattgcatcgaaggtgtcgcaaggtgaatatccaatggaaagactggtcggcatgcctgtcaaaattatgattagcatctaccaagtcccaaagccaaaggcgatgccgcaagccgtaccttgccatcagcccaatccaccatctcctcgatggggagagacgcccggtagattgatgttgtcttccaccatatcggaaatccaaggaatattattacggcccaaaaggctgctatcactcgaaatcgcgtttgaagggcggccggggtttctgggggtggagcgcgcttgacgctgagctggtcgccttgagaggacgaagcctgaggagactcctggtctcctgttttggtcgtcatggtcgggacatgctttgtgctctaaatcggagcaacaaaggaggaagtgttctcaagtcgattgttgaattgagggagtttgccgggcggagaagccaaggactactacctaggtggccgcatggagcaacaacagtcggctatactccgtacgacatattttttgagctgaacttttagtttcataatctcttaattaattgatttgggggtgcgatctctgcacccaatggctcaaagcaattcgcatccaatctagcctttttaaagaaagtcccaaaacgggtctaggatgccatcatcgactccgagtgctcttaaatcacaaaaaaacaagggtatattgacaagtaacgccgatccgatgtagcagtcaaaaggctaggcctccaccgctgtacctccacatgcaatgtctagtattccttctcgaagatcttttgaataggtttagcagcctaaatgtcatgaaacttattagcaaactcatcgatagcagacctggacaagcggtataacatacatcaatgaacttttcgagatcttggtcgaggttggcaaggtcattcttccttttcttgttctctgcgatcaagccctgcttgcgcttcaaaagctcttgccgcgcttgctccagcttctctcgttcaacatgctcgtgttcgatgcgggcaatcatgaggtcatgttcgctggaattgcgatgttcgggatgaagctccaagaattcttcgaccgggatcaaggggagggagaggtatttgtgactacagcaaatatgtcaatttttcgccacagtaagatgagatgctgtgagtaggaaattcagatcacgtactcatatgcctcgcaagccgcaatctcgcctgtcagatgcctctgttcatagtacaagttctggagctgaagatgtagccgatcgatttcctgtcgagcctccgcagttgattgcttggtgtcgcgcacgcgaaaaatggcatcccgattctgcccgcgaagttgggccagcagtgcgaaaaggagtttctgttgtttagatgcggctaaagataattctcggaccttggcggcatcgttgggctgggtttcggggttcaggatggtgagaagatgctgacactgcaccagagtctcagcgctagtctgaagcaccggcaagagcgactcatcggcgacgatttcactgatagccatattgtggaaatgggatgaatcggtggcgagagatgttgcgggagaggcgggatcaatcaggatgttcggggccgcagtgtgcctcggggacttagtgtggttgggaacttgcccttttccccccagcgctcggttttcccatcttacactccccctcctttttttttgtactttctagatcctctatatgcccctcattccttgtcatttaaataagctcgtttcaacccgaggttgtgtcttgggttcttctccggtctcccggtacttcttctccgctacccttgcctctcaacgcttatcgcccatcccactccgtatggccttcgactgaggctgaacagttgaactctcaactacaccccatggcttgcggcgcttcttcaatgacggcgcagtctcctgaagcagaggcatttgcctctgccactgcgacccccgatgagaataccggtatgctccgtgatcggcgcagacattcgttccatgcttctagaaaactctcgtgcgactatcaagatgcagatgcagtatttatcagggtatgtacatgcattaccagtggaaaatatacccgggaaatagtgtgtctaatcaactcctaggtcgaactcttcttatccgaactggaacgtcggatgcactggatcgagcaataccggaaatcccacatggtgcaagtcgatgccagtctgaaacgaggctatgctacgctggaagccgtgagagatcaatgctctctcgcctcgggagagttgatgggaagtggcaaaaagcgggccaagattctggttgaaaccctcgaggatggatacaatgaagccctggtgaccaaggagactctggaacaaaaggcgcaagccggtgtgcggttaatggagtcattcttggtcgaacttgagagcaaagtgcatgcggttcgcgatcgcggcatctacggaactatagatgacgggtggaaagcggtcgattcgggcttggttcacgcccgagaaatcgttgacgagggtatggagcgtgcccgccatgctcgtgatactctgcgagatactattgaggaagctatccggctagccaaggagaagcgattgatcaactacgatgaactacctcacccatggcgcgtcaacccgcacatcctcaatggctaccgattcaccacttccaaggtagaatgtgtctcgtcgattttcgccttctcgaatgaaatgttcaacatctggtcccatgtgatcggcctcatcatcgtcctagccatcgccttttacttctacccgcttcacaccaatttccacttgagctccaaatccgacgtcacaatcgctgccgtcttcttctttgctgcatgtaaatgtctagtctgcagcactatttggcatactatgaacagcattgcttcgcaaccattgatggaacgattcgcttgtgtggactacactggaatctctatgctcgtcgctgcctcgattgtgacgaccgagtacactgctttctattgcgagcccttctcccggtgggtatacattctgcttaccatgtcattcggcatcggtggcatcattctaccttggcacccaaccttcaaccgccacgatatggcatgggcccgcgtaggattctacgtgacccttgcactcactggtttctcgcccatagcgcagcttatttatacccgtggcttctcatggaccatgtatttctatgcaccagtcatgaagagcatcatggtgtattttatcggtgcctgtgtctacgcttccaaagttcctgagcgctggaagccaggtcttttcgattatgtcggtggcagccacaatatctggcacctggctgtcctgggtgggattttcttccactatcacgccatgcaggacttgttcgcgggggccttccaacgagccctgggcgagtgtccgaacatgacgatgtgaagttacgtccaaccaacctttgcattgtccattgctctttgccttttgctcatggacaaatatcatgtggtacgtggtttcgcttttcaacatacagcgattgaacgtttagcaacgtttaggctcacagtttgctacgggtcacgacttgatatggccctttgcaatgaaaaattttatctcttttacgagagttgtcaccgttgatgcccattttgcctgcatggatggtgtttgtcttgattttctactcttcttcttagagccttggattgtacataactccgatgtctctccctttcgcaccattcggtctgtctagatacagggtgtgcacaaagatttttgcttttttgcgtgtacttttgagattcttgctgcacttaggaatctacatattgtagactccctttgtcaatatctgtagaacgaacaaagactgatttcgatatattctatgtttcctttcgtaaattacgtatctctatcatcagccatgggtttcaaagttgttcttccgaatcctataaagcattaatcctctcggtatattgttttatgtggaatagagagttatcttcctatatcggaaccttgatggttctctatatggtaggccttgttcctggactgtacttgcaaattaaattccatgctctaatgtatgtgtcgtatattcataactccatcatgaagccattgccctatatacatagcaacccaagccatttcctcgcggcctttcgaggtgttgtatcagcttttcgcactggaaatgcgccaacagtttggtgtttatctcgacgccatgggtttgagatacaccagaaagcacggggttgagtccacgcatggccaaaatcacgagatcaagattggacggtgggaaagaccatcacaattattgtgacctgtacttgtcggtagacgatgaatttcctgtctttgaggaggctttggtgaatatttatagccatctgaaatgaccatcgcagaattggtgattcagatttattgagtgttctcggtgacagccttagcctcagactcagctccaccgcgctttcggaagttgccctgcatccagcagcggtacatcttttgtttggtcccacggttgacaattagtcgccgatcagcccccatgttaaggacctcaaacgctccgctgtcctttgccagttgtttggcctctgcagacagctcctctgcgggctgaggatctttcttttcctcggatgcttcttcggtggggttctcatcaccaataggaatctgcaatccgctttctgcgctccaggtactccacatgtcgatgagctggtccttatcgaagaagtaaacacgtgtgccatcacctcggatgtagaaattctcggccatgtatcgacccttcttgaatcgcacttgggcgaggtcaccacggccgtagtcgcgaaacaacacacggccaccgggcttcaggagacggtagatattgcggatagcctggtcccactggttaggggccagggcggagaagatgaagattagaatcacaacgtcgactgagccttcggtcagaccgggcggaagagagtcgccgttctcgtcaggcacagcggttgcgtcccagacatcagcggacatgtatttctcattgtagagctcgctctcgcgcatgaccttcacggcatacttggaataatcacaggcatggactctcagatgctcattctcattgttggccagcaatgggaaggcggtatttccggctcctgcaccaacctccagcacaacctggtgacccgcgtccttttgtgtcacatcagcgagaatggggaattcttggcgcagccactttctatccttgaagaagttggctgtgttgttcttatagaaaaggtcccaccacttggcggggtcttggttgaaccgattgcgatcaaagtccgacacacgtgtttcgcgctgtctcgcatattgggtctcggcgaaagccttaaactcatcgtctggctcgacgtgatcccaagcattgaactcaaaaacatcatcgcccttttcaaggtatcttgagccgaattggaaggggtcggtccgtttcaggttgttgctgggatcgtgggaacgatgaggatcgacctgaggaggctcgacattttgtgtcacctcttggatactgggatcgacggtcatgacgttggttgagccttgtagtagttctgattgactcgagatttggaattcgggaaaagaatataatcactcaagcgatggtcgagaaggcggggagaacaaaaaatttccaggcggcgacgcgattggcggggtgcttggatcacatgactggattttgcccaaatattttcttgtccctcgacccacatgactgttcaaccaatcatatgctctctattgatacaccgcctcatttatttttgggtacgtcggatcttatcgcctatcgcttatcggtcttttacttccgtggacgacataagatgctttactgaggatcaatacgtctcatatgtgctagaagctcgaatatcattatgctgatataagcgctcaaagattgtgatggctagctaccacttaggctagtaatgcagaaaaatacttgatgtatgagactgattgtttaagcagatatctttcttagcttgatgtttttttgtcaactcctaattgacttcgttgagtctcatttgatttggctagcttctcctggggcaagtatgtttcagagccaatggacgctcgatagtatctcggaaatagttgcagcttgcatatcacaattcaccgatgctagccggtgcaacctagcgaaacctagcattgtttgacttaccatgtttggctctatggtattattatgagaggtccacgttttcttacattatgagccaacccttcattgaaacagctggagatgcttttgatatccattgactgcctcaggcacctatactctcttatcagctaatcagagttcctgggaatctggatgcctgcgggtgcctcgtccggtcagctttctggcctttctttcacccctcatttcctgcctttctttctgtttgagcatgattttctagattcatatttgattcatattcttcctgtttgccggttcaggtctggggcttatcgacgcaagtggggttcagcccactatcggcgtttgaggctcaacagtcgaactgctcatacgatagttcttgtccggcgttttttgctacagaactcacgggccaactttctctcgctatagtcaaatcaatattggctttgacacagtcaattagaaaacagtctctcattgagtcatgtatttcctctcggcactctgcgggtgcttcactcgagacgagaatctctcgcagccccatccctcttcggaggtggtcgccaaaagactcagccccaacggcatccagacaggacgctttacactctccgctgaaggcgaatttatccgcccagcgtccccagcaccgccagccgggagccatgggcacgggcccccgccttctgactcgcaggatggaggctattctagcgtggtccctctcccgcagtactcagcccgtccaatgagcctccacgagaagactttggaagcccatatgcgtgatccatctatttcctccgagtctcagaacttctgccccaacgatgaaaagaacgatcattacgatggagatctcacctccgatagttcatcagccgtttcctttcccagcagctacggcaatacctccaccgcaacgagggatactccaccaccgccatactctccccgtcaatccgtagtgctgagtcgctcgcggtccatgtccatctcgtctactatggcggtcatcattaatccacctcccgctgcccgcatgagcggttcgcggactggacctacatactctgaggaggatgatcagtcccttcgtcgtcatcggcgggtctcttgggagagccgatgatagactcgtttaatacattctgaaagaacgtttgcttgctgccctttgcttattagctacctgcttaatattttccacatcgctcttttggtctaggcgatctggaatcgtggcctgtgatcgtttgggatcttccattgtcgatttacatttattttgcacgactgctgcattgttttctttctctgcttatcatttttctttggtactgttctattgcacatgacgcgacgacatcatttatatggtatgactgggactggacttggtgcaaaaagggatttcttctgggatagccttggatatttaatattgatctgcacatactcgcttgtcatagatgcaggaggacaccgtatcgagatactcggttaccggtactcactcacatccagacatagtgtaacaattatgataaaccgaataaattatactatatttcgtcaatcaaatgttccacatctagcttgattactactatcctcgatagaacaccaaccaacaaaaagggtatcaatgcaaatccaagatataaaccaatttcactcaaaccaaatcaatccaactcaaaaaccccagcccgttcctgctcatgtctaagtaaatacccacaacacgacgccggaaactctaacaacctcaaaaccaacggatcacaactatcctccagaaacatacagatagccgtacactccgaacgaaccctcatctcaacccaccactcctcaacataacacataagccccaaccaccaagccaacaaaaccagcgccggcgcctccttcctaagcaaacacccatagaacggattctccaacctccccatccaagtattataaaccttaaaactctccgtagtcctctcaaacggcaacaaccccatcagcatccgcaaaggccacaaacacggattctcctcgacggtcgtctcctccgcaatcccacaaagatccgccaaatccggatcaagacccacacgcccgggacgcttatcctcgaagtccagcgatgcatcccgcgactccatgaataccgtccaccacatgctctgcgggagccagtggcccgtgcgctcgaggaggtagcgcatgccggcttggattcggagccaggttagtgcggttgggtctgttgtgaagacgaaggaggtgcgtgggttgaaggtttcttggtggaaggagtgcatgctgactatcatgcaggtggagtagagcttatccatgttggcgcgggttatggttttcgagacttcggtcgagtattggttgattgtttgttgccagtggtaggcttctgctaggcggtagtctttgttgtctggaaggagggtgcagaggtgggttgttgcggctgctattatggcgtgcatgaggaagggggtctgggttggttggtggttagtttgggagttttattaggtagattatagctgtgttttgttgaggtatggcttttagataaactatggatggacttacttcgaaggcaagttggaccattttgcccattacgattcgaacgggtgtttggctttcggttgcaaaggctggggctttgtggaaatgatgcaatgcttccaagatgcgggttgatgctgtggcatctgtgagtgctctcggcagcttgataccggtagcagagggcggttgcagtaattcattcaatttgtccgcgaccatcattagagacattgaagaggctagagaatcaatcgagatcaagtcggagttggtcttgataaactgggaaacgatattattggtcttctgaggttgaggtcgggctggctggcccgagtagtcacactcgctgccatgtttttggcaccggagacaacgtggttttgcttcatcgcacttgatcggtcattatcagcagacggttgataatgggggcgtccgaagtaccttgactcttcgttgcttacagttcacacagccggcgcgggattttcgatgagacctgcgggaatgatagaccggttcagatggttcggacccgcacgctagagaatcctttgatttgtagtttgggattcgaaagaccatattctgcccctgcatgtgtctagacgagcgtggccggggcaggggtttagattgcgtgtcgtccatcgtttctcaaagtataatttgacacggggaatatttgccgacggtctattaaatccgaagtacatagaagactatacgaacaagctggtcttaggcgtgcggggagtgtgtccgtagcctttctcatcgagatatggttacgatatagctctgcgcctgagatgtcagactggtgcaaggcgactagtgaagctcaagtctgtagaactgcgccttgttctaatcagcctggccacttcatgtgtccaaatagaagagaaactaggtggtgacggagaatacgaggaggcgaaggagaagactagaacggacgctatccccgattaggcaattctcgtattcgcagaaacaatgagaagttgaccagaaactgaataaaagacatctacttttaggaatatattgaagctatgaagacctggaattggattcgagaaacgccatgcaattcatcactcatcgaagatcatccaagggggtttaacccatcttggcattagagaaatccatctctgcaagcaggttagcaacatattgaaacgaaagaacatcgcagaaattcgagagattgaaaaggaaacaacgtaccgggatgctcagcctggaacttcttcagcaaatccatcttccgctgctcgtcactgctgggaccacccatctctttctgtcgctgatcatacatcatcttctcgaccatggcgcgagtctcgccatccagatcgcccagactggagttctcgggcgtaatcttggtgacatcgattttgggagcagtagtcacaacatgaggccaccattcgaccttgttcaccttatcgagatggatgctgatttccttgccggggaaggtgggggtagtctcgagggtccaagaggattcgtcgacgcggatggcgtgggggaagtcaccctgaacagaaaaatgggggtaattagctgactgatttttgggttggaatgtgttgatttagagtgtatggtgtaattctccgggggtggggaacagtggacatacctcgatgaggggttcttgtcccttgattgcgacgcggagtttgttcttggtcaacagcacatccaggtcgcggcccttgaaattggcaggaatcggtgctgtcacatccacatcacgaatcgtctgtgtccacttgtaagggagctgggcctgttccgcatcctcgcgggctttgcgctctttgttctcgcgttcacgttcggctaggtcggcgggggaggggttttggtcgagatcggcagacatgatggcaggtcagaaaaagcaaagatagagtaaggggggctttttgatagacggtgtaacggtgtacaaggtaggcacggagtatacggagtaataattcgtgttcaggtgaggatggaggagcaaaagcccaaaaaggaaagatgtggagacacttggcttttttccccgttggcgcttttgccgccagccctaatcgcctatgacttttgcgcaataccttctacaatgcacttgtactcggggatcttggaatttgtttgactgcataatctgaaactggagtacttgtcaagtgtcctttgtccggtttccgtattcaacatctcagggcgcggtcatttgagccgggattgcgatggtgctctccagaatgatattatactccggagcagggaacgcatatgacatcagcgatcgataaaccgcagtagcgtattccgctacgagcactaatcaagtcagaccggttgactccacaccactgtgatatgcataccggaaaagcgcgcagcagggcgtaatgtcacaataaaccacaagggtaatgtaaagaaaaagacttgaggccccagcgggaagatggcgttgaccaaccggtcgttcagacggacatggtggcgcagccagcccaggtgaaaagtgatgaacgcaagcagtgccccgagaagcacaccgcttagaatcacggtggcattgtgcgcgacgacatcgaggggtctagggtccgttaggaaatgtctcctgcctctttgggaccaccgacaagcatggcttacaaggaagggtgggcgacttgatcgttagcggcagccatgacatgcatcggctgaaaagggatctgagggtgattggcaatgcagtggacaaagtatatgtcgaacaaaccaataaaccccagagaggcaagtgccacccccacttgaggctctctctttccttatttaatttattttacatcgcatggagttgtgtcagtggagaaatataaggaaagtgtgttctcctgcatgttgccttgtagattgccttccaagttgtaaagcgaatgaccgaagcttcaaggtatagaatgtacccaaaaaaaaaaacacgctctgatcccatccatgctctcatcatccgtagagaaaaaaagaagaagcaaacaaaaaaaagcacacgaaaaagcaaacaccagaagctcggttcccaataaatcccacagcttcaacggcgctggcgctggtcgtcatcatcatcatcattattcttgttatttgccatcctcgctagctcgttctctatgctagctgtcagtttccctcttctacatccatgtcagaaaagaaacgtacctcgaatctggtcgatttgccttgcggtgtcttgaagcatctggtcccatttcatctggtactcttccacgattgttggcttgtatctgttctgtggctcctccttgggctcctccttgggtgtctcgattttgtccatggtggatatgaaagtgttcgagaatgaagtaggtatagttctcagggggctcaagaaggtggaagtgggtggattaaagtcaaatcgacgtgcgacaggaacggctttatataaacgacacgcagaattaaaatcaattaaaaatcaataataaatcgtcgacactagaaccctgttcttaatttcccaaagagaaaaaaacaaaacccaaaaatccctgtcaaataatgttggcttcggaaatagaccggtcacgcgtctaaaggtcaaggaacgcgttcaccgacatcttcccttttggagcctaaattgaaaacgggccatcggtccgcttagcctgtcttagggaagagctgaattggcggttgctgattggcgagatcagtttgtgacgggtttttttttatttttaccccttgagcaaaagtaccgtttcagaaagtgactggactggggatgatgtcagaccataacgggacctagcatagtacattctgtacaacagttgtactccatacctgatcattccaaatctgccttgtcggtacgactaataggatggcttccagcgtaccgaagttgtcccgcacccaatcgggggctgaggaaccacatccgcgccaaccgatcggatatcttgggtcgcttttaaggggtgggaaagggtcgatacgtatcatatcgaagaagaatcacaattttaaagaataaaaaatataaatatataaatatataaataaaaaggggcaccggggaagcgggtagaactggattccctcccagtgatcgcccgatccacccgaagttgatacttctgcgatctataacggagtacggagtactccgtactctatggatatactccactactttcacaacgggcaacaaaaaaacacatatagatcttggcgcccaacaccttcggccctgaagttcagccctgatgtccaacccggagtccaacttggagtccaactcggagtccaacccgggagccaaccctccaaccctggaaggctagaaggccgaaagggctggctgaatcacacggaccgctcgaaaaccctgtaccactgtagtatgtacaaggtagagcccaacactacccgggatcctgcatggctcgattggcccaaatagcgtttacaccgccgatagccccgggacgtgcagagccgtagacgttgcatctcgacaatccacgtggtttgcatacgctagcgctgtgtcatggccgttgtccttgaccgcatccctctatccatctacggcccgacacgttctgaaacgctaagatgcttctggtgcttttgtcaagggcatctcagcacagtcagatgaaaccgcagttgggatgtttgatcggggctatgcttgttcattccagctgacggaagatgatggtttaatgggcttgattacattccgctatctgaacggagttggtcttgcctgtgcattattactggctgtgattatagtttgtccagggtatcaaaccttagactcaagggttcaatatccaacacaagggagatacggtcattggtctaaggctacaaggatgaaaagataaagagcaagcggtaaaataatacctgatcctttaagatatgcctctacatggtcaaattccacattcattccccatgcaggtcggcaaatgaaagtaaaaataacaaataaatcgtaaattctggcgttggtgcctgcatccattggccagttatgtcaacgcagccctttccgaggaaccgcccatcgacagcctcagcccggtttgaagagggggtggcagaagcacgtatgcgcaatgcgcccatattcacatggtacaacgccgggttaagacatgatattgatcccgctgggatagattgcttagaaaatatttcataagagtagatagactcccatatgacgccagtatatgagatcgctgaaaaaaccgagagaaaggaaacaggaaaaaaaaaaggaaaaacaaacttaggatgagaaccatgaaagtccgaaagtccgaaacggagacggtgagcagcgcctcggactaattcgagtctgggaggaaccagtcaaggtcatcagactcgaaatgcgaggcggatgtttccggtactgcaatgccaccttcgaaaggatcgacaatcccgtcatcaaaagggaccgttgtctccgtctccgaaggcagactgctgcgccgctcgacgaggtcaaagaactcacctgcaaactcagctagctcattagccactttgagctccaggatagcttcaagcacttgcatttcctttttccatttgcgatcacgctgcgccttttcctcctggcgacggcggcacaggctgtcacgagggaggtccgccacgcagttgggacacaagtaagtttcctcgcaatacgagcatttgcagggggaatgagtgtatatgcagtccgcgcatacatacaccctgcagcctttgcattcgcgcagatagctagagcacctaggacgtggatccctgataccgcctcggacatccctgattccggttataggatcagccggggggcagaaaaaggattggcaaccttgccatcgtggttcgaatagcggcgaatcaaagaaggtggaggatgaggatgagggaggggaagaatggtcagatgcaggggccgaaaatgagcgagttggttggttggagaagaaggaaacaggagccgactgatcaccaacatgtgattcgggtgtattttcctcgtccatactatcctggcgtgaatcgtcaatgtagcttttgttggtcgagtcaagaagctcctggcttctgaatagtaggtcgtattcgggaatttgactagaaataagagatcccgaaagatttccagcccaccgattttgaatgatttgcttttccgtctcaaggtctcggtagccgcaaatccttaggcgaagcccgcggaggtcatgctcaatacagagaggccttgagcagctcttgcagtgcaccttccactgtggtgaatcgtaacatccttgacacaagttacgcggacacggtgagacttcccggttaggtggtcctaggagccatttcatcatcgccagatgacccgtttcaagcgagtagtccggtttgctcggatccccatatgcatacttggggaacgtcttgctccattcactaacggtgtactctagatcttcccaaccttggccacgaggcaaaggcacggctcgtacttggtccacctcaccattgcgaggtccgatgctaatcccaccgcccccagagaggtcaggcttggtgcagcaccaatggaaattgaggataggtggtgggtccaatcctgtaccatggggttgatggggatcggtcagaatatccacgggatcctgcattgagcctggagagtgtgtggcccctggtgcccaccagaaggaacccggtgcgttctgggctttttcagacgaagatgttgtgcttctgtgaagatacggccgttcgtgggcacagcttgcgcagagtgttttacggcatccgacacagtgcatcaggacgctgcaatgttcacatcgctctgagatatcctcgaggcagttgtcacagcggatcttgtcgacaaattgggtatgactccggcgcatatgggcaggcgtcattttgccttcaccccagtcgataccctcgccagttcctaatgcctcgccataaaatccagtgtcgcgattctcccacagctttccatcgtatacgtgtggctgagaagactccgtttcggttgggccgatccaatttttggatctccagagtcgatcaaagaccacccaaacttccggcgaccctgctccatgcgggaacctcgatttgacataaccggctctacgagcgcatctaccggcaggtgtggtgcaccaagcggtatcagtccaaatgcctagcttgtggcagatattgacaagttcatgggtcgactccgcgtcagcgtccttccgcatcagtgaggatgatagataagggcgtcttctatggtgacgacagcgataggcgtagatactcttgagagcaagctgttgcatcccgggagagctgccggtgttattctccatgtccatgtcacactgcagcgcgaacatggtcaagaaaggaacgatgtgatatttcaaagacacattcttgcagccccgaacagagagatgtaccagcgtctctcgacgtgaatgcagcacggttgaggtcaggttctcccccgaaatggccgtgttatccagttctaggcttttcaaacacctactgaatgggataaccacattcatcaggaacatgtctagcgcgtaaggcctagattgacgcgcgggcgctgtctcaaggccgcttgggtcattgatttgaggatttggcagagtgcttgaaggaaattgtaggcgaaacgagagtgacttccatgcggtcggatatgatcgaaggaacgtacggaggtaatttgaagtgtgatacagctttatgatggtatcggtcgggatctgaagtaataaagactcgaatataggtgcatttgttgttatcactcgctcaaaggtggacagggtccgttcttctgggataacagagtgttgtaaggcattttccagcaccgtcgggtgcgacgctggatcctcaccagcagcattccccctagccatagtgtcgagatcgtgattcgtcatatgttctgggtgaacaaaagatgccacttcttaggtcgaagatcgaaatggcgcgaggtcgcgagctcggcggttagagacgcggcacatgataagacaacttgaagatgcaatcgaggggggaagcacaccctgaggtaagccaccatgcaaggccattaaaggtaaagagtcgataattgaaaagatcaggtagcaagggctgacgaattggggtatctgaagggggacggagaaagggaggggtataaaaggaggggaacagacgaaatccccaaagagaggggaaagcaaagaaagagagaatgattacttatgcccctatgacgctgaatcaatgaaaggaagcaaaggcgtaggaaaacaagtgcaaagggtgagcgacacaaggtgatatccggatgcgcccgttaggagagaccagcgtcatgtgatagccatcaaaccccggattttcagtcgttcatagattttgttatgcataggaaatacgatgcactgatcgctgagtctattgcaaatggtttctatgctaggccatgtggactaatgtttgtcggtcgcatcgcctacagtgtagcccctcgcaatacccttgcgcccttccttgactagggtactatcatccaagtcttcctcatcatatcgaatatcaaagtcgctacccagacccttccatgtccgttgagatcgcaagtattcagcccctggtgaaaaggcaccgccgatcatagccaagtcacccttagctcgtcgcgccagtgccctagcagcggatggcccgctggtggatgatccatcaacttgagaagcgcgaggcgcgggatcccgcattgggcgggaatgtgagacgtatcgaccggtccgaaagtcaaactcaggcggcgccgactcgggttctgacatgtcgtcctcatcggacatggttgtgctagtggatgtctcctggtcatctccatttccgttgacctcctgggctggtgcgtcgaggactgcctggaagtcactctgccacgctcctgtccatacccggtctgagtcatttttcaaggccagctctaattcgaagggagtgatgactggcttccagaaatccttgctatccaccaaagagctttcccagcagccaatgaccacccaaccaccgatttcactgaaattggctaccttggcagcattcaatttgccaaccacgaacatatagctcttcttgcctgctttggcaattcgttccttgacatgttccacaatatgcaggtagttcttgacactcaaagtgttgataagaatgccccagataggcacggttgtcagagaggcaagagtgccataccggcgtcgcaaaaccgcagtagttgaagcaggcaatggcttaacgttctcatttgaaaggtcgttggtaggataaatatggattgctgcaacgcgagacgcgagcgtcatcatgagggctgttggcggatcggatatgtgaaacagttgccagtcggccagtgtctcgggcgcctctcgaaccgactcgggaactgtgcgattgggaatcgatgatgaaggttcatgaacaacttccgttgcatatatattgctatatccctcttccaccaggcgagcgtataccgtaggaacgtggtctgaaaaggtgacgtcggccgcgatgataaccttggtcgttggatcaagataggttgccttgaacgctcgtatcactggttcaaggggcagatccttatgtgtgaagacatggatcacgggtagacgagctgttggcgacagacaggacctcccgtaatgtacaaccacatctgcgtccacatgttccgcggccacttcgtcaacgcagcaggtcccgtaggatgtatcggccaaaattgtcaaccgaggagagtgttgttccgttttatcctccacctggagctccgttatcgagtgagcaaggtcggtatcggcgttgctagggtcggtttggttcgagggctgtgtgccattggtgccgacttcttcgcgttccaggccccggctgagcaattgaaatactcgcggagcatcaggaagcatatcatctgggaactggagcgcaatgcgcttgtaccgcgcttgccgaatatccttcaatgtgcgctcgatatcgtaggtaatggaaagttcatcgtctgacactggagccgttgggtctcgcgtcgccactagattgatttcttcgagaatacgatcatcagcagtcgacagcacaggggctgacttcatttcagaccccatttttgtaagatagagggaggaagcgtggtagtgaatcaaaaacgacgaaaaattgcaaaagttttggagaaaaaaaaaagatccccccaccaccccgccaatggataacggtaaaatacaatagagcccattggcagacagcagaccaactgcctagagagcgaattttggtgcaaacataatcaaattattcccgaactacagagctatttacgcatttcagcatttcgacataaaaaggcaaaggatatctacaagtccgcccgtgctggctctcccgcccaaaccctgcgaagcaactcgcggatcggcgcgcgttcaatcgggcgaggattttagtaagtattggatagcgcaatatcagccgtattattgaggtctccttccttaatcccgtaatccttcacgccacgcgtgtgggaaagattggaaggacatgcctacgctgcaaagccaggcaccatacaatgccttggatcatgcagattgagaaaataggttctcaataatctcggaaagggaggacgcaagtgcccgtatgccctcgagcgccatgttgatgattgggttggtgttgcgcacgtagaaagcctcggccattcaggaacatattagattcgtgcataggaagctggtgcagattaatcaagtcgcaatggcgttaacaccgctagtggcactaataggcaccggcaaggtcattgtgagctctacattatagatgaccgtgtcgggcaagattctgggctccgactgagtcttcttcgatctattggcagtctcacttagaatcggagccatttcgctaatagtatatgcagtcggaatacaaatatgcggtagtccagtgcgaatgctgatcgccttctgaagaccgatagtgctttcgcctccaatggaaatgaccgaatctgctccctggtccttcgcatacccaagagccttgtgacattcatgagagtatgcatagtcgcacccgctgaagatacccgtgatctggcccttgagcaactctttcgctttttcggcctgaccgatctgcaggggtgtcgagagcaccagcggggccttcacttctggccaggagatctcatcggcaaatttttgcagcgtgtcgctgccgaagacggacagggtaggaattgtactcgaaggtatccattttgtgtttgcaattatctgaggggacacttgccatcttatagtccgtacccccccggcattcaagcctgtggggttttacgagaagtcgtaatctgggattatccgagcgatgcaatggcgaattttgcggttaatattaaatggccggtttgaattgtttgggtacgctcggttcttgcgtagctacgggtattccgatcatagtgaacatactatggacgttcgatccacaggtggattttgtgcctggatataaatttccgaaagtagcgggtggggctttgctgcatgagtcccaaagtcgcttttatgagactcagactcaggcttggattccagtacaggctcggactccgtgtaatccattgtattgattgacggaaaacttgaatgggtgatgggtgatttatagtgatacataggcaaactaagactagcgaagcccctctcctgtagtggtaaatcggatcaagttatctatgggatattcaaactatcctggctcaatgcgctctaaactattttatcgccggcaaaaagtcgatgagcggagcggcaaggatattctcgcggcggaaagcgaaagcactcgagctcatgccccaacggagtgacaacaactagattgttgaaggcagaggatctgcagatgtcagtatgtaattttcgttctatggatcacttcgggtcggccctcaagtacccacaagccgcaaccttggaagtttcggttcctattcgatcacattgatatcaccgttgagactcgaactaatcaacatacgtgtaaggaaggtaactgagacatagtaattcggagctcagaggtacagcgaaatttaacaatgcatattcaattttcggcttctcatactgtattattagtctctattatagattctcaaactaaaacacacacatgaggcagatacacggactacagtagtggctgttcaatcttgagttccgcttaaggagctcattatcttcaaatgcctctcattcttaatagaacgttgtctatatgtctgaagcatcccactcacgtgatagggtcgtccaaatgtgtccatcagccccggtagatcttcctctccactctccactcttctcctctcgcatctgtgcacttctatggttcccaagtgaatgaaattgaattttccttttctgatattctttgtgcctttcatagaaaaatcaaacatacaatacatctcccgaggtcaaaatcaacaaagtctatatgagtggacacaaggaccccgaagacaccagtgagcattgaccaccaggctgtacaccgaattgatctctaacctcagattctatttaactcagaatttcattattgaggaatgaagactacaatcaattgagagacccagacgattttgcatattacctgtcgcaatttcagcgttgccaacatccaccaatcctgcaaatggacaaaatagagatgcaaaccgatagcgggccaaatcttctcgcgaagcgcatggcttgtgaagagatggatatctctcctggtaccaaaagagctaagggctttcatgatgggctgacagaggtggttatagctccagctataacccggatagttcctttccctgagaaggtatgctaggaccttgaaatgccaatcaacattctaactgttctgaagcctgcagttttggaagaacgaaatggcgagatcgagctacgagttgtcaacaatgatggctctagagagagcacgattatccttacaggtcttaaatgcctatttcaaaagcaacttccggaaatgcccaaggattacatcgcacgtctcgtctacgatcgtgctcatttatcgatcgctatcgttaagaaacctctagaagtcattgccggtatatcatttcgggaattccgagaacgcaagtttgccgaaattgttttttgtgcagtctcatctgatcagcaggtgaaaggatacggagcacatcttatggcccatttaaaggactacgtcagagctacttccccggtgatgcattttctgacctatgccgataatcaggccattgggtattttcaaaagcaaggctttactaaagagctcactctcgagaattctatctggatgggctgtattaaggattacgaaggcggaacacttatgcaatgctctatgcttcctcgaatacggtatctcgaagttggtcgaatgcttttgaaacaaaaagaatccgttctagccaaaatacgtacctcgagcaaaaatcatatcattcatcaaccgcctatgcaatgggctaacggcgtggttcccattgatccactctctatccctgccatccgggcaactggctggtctccggagatggacgagttagcacgacaatcatgccacggatctcgtttccgcggaccccatttcaacgaatttcgtcgttttattaacgatatccaaaaccacaaacaagcatggcccttccgcaatccagtcaacaaagaccaagtccctgattattacaatgtcattttatcaccaatggatctatcaaccatcgaagagagattagagcattacactactccgaaggaccttctcgccgatctcaagttgattttcagtaactgtcggcagtacaatgatgccacaacggtgtacgccaagtgtgcggtcaaactggagaaatacatgtggaaactgatcagggagattcctgagtggtctgacttgattgaagaatgattgctgctagtgcattctttggggtcagctgtgcgagggttttgtatggtgggagtcgatatcggatttgagaagctacacggagcaaggtatcaatgattcgatatttcttgcgatttttagcccctaacgcccctaacgcttagttgacgttcccgtggacatcagaataaactagagccaagtaagggggagacatatgtatgtacatatcggagatatagatattcttcctctaattggcccttaaaacccctaacaccaacgctatgtacactttttcttgttttcgggctgaacaatcgatttgcagatgtgggtatcagagaatgggatattgagacattagtccaagtcatggaacgccatgacatgctgtccaccagtgcggtccttgcccttagacttcttgcgcttctttcggtcctttgtatcctcgcgacgttccgcatcgctgttatccgaatccttgtcgtcatcactatcatccatgtcttcgtcgccagatccttcaatattttcctcagcctcgtgccacaccttgacggtttggccaccaccagagaccatccggccctccacgtcaaagcccaagcctacaacaccatcgatctcatcgtgcacaacctcggaaacgacttggttcggtccaatgcgcacaaatttcacttttccgtttgagaggcctgcggccacaaccttgcccaagtagtcaggcccaactgccattgtctcgatggaatctccgccatcggcattgcggtcgacgtagatccgctcatcctggtcatcccacgcgcccttctcccagagagtgaggataccgctggctccaccaacaatcaacttctcgcctctactggttccgctggagggcagaccacccatgaagatcgagctgaccagttcttcttcctggttctcgctgcgcaccagaacgccccttcggagatctgtcacggccaaggttgttccaccggttgtaacccactgcttgctaaagcccgatgtgctagtttcggaagccggcagaggagtaagagaggagatgtagtcgtcatgggggtggtgcgtttgttcaggtcgcgcggacaccttagaataggggatacggagatcgtagagatgcagagcgctcgagtcggtaccgaggaggagggtttgaggagagagggcgtgaatcatggttggcgcatcaatggagctatacgacatcaaaaaaaacgagaggtcagccaaatgcaaaggtctggatcgcaacgtttgatattcgggagagttcctttacccgttcttctcaaaaggaatcacaatcttgttttgcacctgaccagtctcactgattgcagctttcaccataccgtctgtaccagccgagtagagcatcttgccatccgtactgaaccctagggtgcgacagctacccttgtgtcgccgagttctccacattgtgtcaatgtggccctttccggtccgggccaacgaactcggtgcggcatcttcgtcaccctctccttctaaggaaggcagtcggaaggtctggacgtggcccgaggctagaccgacagagactacgggctcctcggggtggatagcctgagcgaacaggtccgaggaaagcggaagcgtgcagaccgtgtcgaacatggttgcgaaatgcgacgggggtgagcacgaaatacgaaggcttctagcgagcctactaaatttttgaattcgagtgaattgaatcaagagaatcaatcgcaaaaagctgtagcttcagagctggccgtttttttctgccgggccgagaataccccgaccgccttcttacttgttcagttcaaatgagcctcgattctgacaaacagctctgattgtaagaaagataaatgaaaccaagaatacagacaactatcaacgaaagagatttatacacagttcaccattctcttccaaatttggtatttccaccactggctcaaggatatatgcagcacggagaccccgcattccattccaagtatagccgaattcagcaagtgaatgtcatttcgactctctaggaagaagcgtaggtggagccaatggggccgaccttgatgttagagtaggtcaccttggccgagcccgactcggcctcaacggttgctgggtcgccggaagtggtggcgcatgtgccgcgagcagcaccgggatcggaggcagatgcatcagtggggtagacctccccatccaaccagagcatgttagcatagtggtcatcccacaggctcatgacaaggaccattccctggtccaacccctcgcccatggtagccagaccaccgtgctgggcgaagatatcctcatcgccgaaggctttcttctgggctgtgcagaagtcggtggtgatcgagtttccggtgacaccgctaacatccgaggctgagttggcgatgacttttccgtcctggacgtagatgcgcttgatctcgctgagggtgccggtgtcggtgccgtcgctggtgatgaactgagtgaccacggttatcttggacttagtgtcaacagtcatgccgggaccgaagaaggtctcatttcccatgcggaaggagttaaagtcacatccatcgggatcgcaggttcctgcgtagcgggtggaagagtaagttccgccacaatcatcgccctcgcacatagtctgttcagggctgtcgcaagggtgaggcgtgtaagcagtggaaatgctattggcttcccagatatccatctcagggcagcaagatccatggccgccaacaccagcgttcttgtcgttctcggaaggcacccagccgtccacgttggcctgtatcgcgcatcagtcactttgcccgcaaaccgttcgaattgaccagtataaaaactcacctggccgttgatgaacttcagatcacgagggcactgagaatcgcaatagccagttccgtacttggcacctgccttgttccccgtgtacttagccaggccaccatcggaatccatggagacaaagtacagagctccattgagtccgcagggcaacccggaagtatccacgtcgaatgtgaactcctggttcttcagcttgaatatctggtaggtactctcgtcctccatcaggtacagacgagagccaatgttggcgccagtgacgaagctcaaagtgagggcattgccatcagtggtcgcaccgtatgtgccggcgtagtcagcgccgtccaacgcacagttagtggcgcaagtctcgtcatcggggcagagagtcgcatcccactatcatcaaacaagtcaatcaatgtgaacgctcaccttctcggttgaggatctcttacctcgtttccagtgtagcagttggtgtaaccatcgacagagtgaagccaacgccagttggcatcaatgacaacagagccctgctggtcggtgcaactgcccgcggtagtgcacttttgccaggtcaaagagggatgggtctcagccgtcaatgtgccagcttgctgggcacgggctgcggccgccaggacggagaaaaggagtgcgcgttgatacattgacaattaagcagagaggtcggtttgcaatgtgtccttggtgtcttgttgtctggcctgctgctagtgaacacaaataatctcgggtgggaatcggccattatatgtcttttctccgtgcaggatttctctgggccgtgactaaagtcctttccatagcatgatcgattgacggaccgtgaggccgttaccaaattggtattgatagagagcccacaattatcaatgcagggtcaaattccatactaggtgacctccggcgttgtaggtacgttaatttgggactggaaccggcgcctgaatcaggaagggaatgatcatcactgggtgacgctttgttataggatgtctcaaaatcctgactaatatcggagtagataaacatgcatgttaatcgtttcaacacccgtgaagacggagtatgccccgatcatccagttctgtcgattgctgtggaagattcggggagcttaacagtacaaggatcaacacaaggatcaactgcaaatagagaccttttgaggtatttttcctatcgatctttcgtatacatcagggcgaggataccagacagggaatttggccataggattcaaatatgctccactccgcacagaacaaaaggccatgggacagttggtggcgttgaagggcgttaaagcatgccaagagcgcttttagatggaatgagcgctacttacatcaaaccttgaaaaggctctctttggtggcagataatgtggggtaatatagacgaaggcgttaggcccaaacacggaggatggcctgcagacccttcggatatgaagcgtttcagtccgaaactagattatatacccttgcagtaccagctgtccggagtaattatttgatactggactgttattatcctccaggttcataacgtctgctctattttttgatatagctgctttctttcaatgattctctagagagtcctcaactcgtcgtctctttgtaaacacatgaatctcaaaccgaggctctaaataaatctctgcataaatcatgaccactttcaagtttccttgggcatttctagtccggaataagataggctctagttatgcacaatagatccacagcgcgatggtctgatggtatatcacattggactaattgcccaactcgaagcatcggaagtaaagaggtacataagtagaaggacacatattaagtcttggctattactgtgtatcgcattgccggatccactaagttttgatttagaagtacggcaaagccgttgtttcagcctgtttcgccagttcacaattctaaacggtagcttgtaaacaagggtgcaatatgacctctgcaagtgattactggaagggatataattttaccgaacggaaagagcgcaggctgatcccccgtgttctagtaaggtacctggtgacaaccctataatccggtggctttaaaaatgtatctttgcctgttggtaatgtcatttagcttaactacccttgttaaccgattttacccggaaatctctaagaagttatattcaagggtacactgtcctgcagattcaaagcgcagatggccaaatccgaccaggaatttgccatcaatatacaagccaagtatttatgtgctccaatggagcccaaataaagtgcctcctccatgagtagacaaatctccccgggcggttatgtggctggagattcaccagccattgaacatggaatgaacaaggccttggacaggctcatgcgtagagatatataactagagcttcaaggatgactacatgtactatgtccatcatttcctgtcatgataagttccttcagggctgagttgaataagtctctaggctgaatactttcaaagacataggtagggtaggtatgtgaataggtagcatcaacgttatatcgatacagaggaaggattcctgctgccgatgcgaaaaacgagcaatattaggatactttctagccaatttcatgagtacctagtcatacccagcttctcacatgacgctattgaagttggttgatggaagggaacattctcaagatctatatgtagagaggagagaaaagaacgggatttattatgaaactgactagttagttatatcattgccactaactatatcataaagtgaatgaagcaaatagaaaaaaaaaagaaactccgatggggggattcgaacccccgttagtgctgtgaaagagcacagtgataacccctacactacatcggaatgttatacaaatttcagagatcgaggtatagttattccagcttttattgatatcaccctaggtattccggtgaaaaatcctataatttactacaatgtcaaaatccagaaaggagggacagcgtgcgcgtaatgggtatgaagacctcgtgtcacttatcagttatttgcataagaataacgatcctcaggcgcgcagaagaaaaattagatacaaaaaaaaaggcatgaaaaaaaagaagttctccgatggggggattcgaacccccgttagtgctgtgaaagagcacagtgataacccctacactacatcggaatgttatacaaatttcagagatcgaggtatagttattccagcttttattgatatcacccggagtgttgtacaattatattctaattatgtcttactagatatttcccaaaggtaggtagtagcaaactcctccaaaaagcagcacaaaagataccaaaaatagacataatgtcataaatcagatattgtagccgggattatatcgatagataagcattataaggtgatatagggcgcgtagggtgtcgcttatggagttgaaaaatgcgctagaatgaaaaggaaagcgtaaggttcaagagcactatccaaccagagttttatgccccggtggcatattgagcttattccgatcatctgaatttttagtatgaagatgcgaaaagccgttttcgcactagatgatgtctaagataaatgaaacatgtcaatcctacagagtccagatgaagtagaagacacacttttccattataggaagtactagtgaatctccagctcgtactgtcgacacaatagccgtgatattaaatgataattccacttcattgatggtaaaaccccgggagctcaaagaatatgcggcaattctcaacaaagacgtaaaaataggctgagccggactttactgagccataggcttctcatcatagtcctaatcatagtcctcatcatcctcctcgtcattgtcatcatagtcctcatcatcatcgtcctcataattgggctcctcgtcatcctcattgtcgtcctcatcatgatcgtcctcttcagcctcctgcgcggagttgtaccacggaacagcagcatcttcctggacctgagtcaattgtcgtgagccattcgttgcgacttgaagaccatgtctcatagtgtgttgaagactggcgattgtagaggtagaagcctgcatttaattaatagccacctaggggagcctcagtattgaagaccactcacatgtccacagctcggtacacaataatgaaagaccttgccatggcacacaacgatttgaccaatagagttctattcacgcaattagaaacattttccgaagttgattctccttcgtagagacttacggtcgtgtacggtgggagcttcagctccagggcctcggtcttgaagaggtgctctctgtacatattgcagctttgcaaagagagtggatagttataactatccagtaagagattagggggatgcattttgaagtctgcttcaatctcagaattcttttctgatgggagggaggatgaagagggaaacattgaggagaagagttgaaatgttctgcgcagctccttccttgccgactacaatctttccctttccacatcctctctttctctttctctttctctttccccttccccttctccttctccttctgcttcatcctccatctgttttcttttcttctttttgagactccatcttcaaacagcttgactctactcttgttgccccccaactttcccagccaacatgggcttcttgttcgcaagcccgagtgatgtgacgctcatcatcatcgaagagagcgagaacgacgaccaccaaaccaagacagccttatttcacgttgatcgttccaaattgattgagagcagtgattactttcagagaatgttctcatgtcggtgggaaacatccgggaatcacaagcccactctcagaggcgacacgatcaaaggcatggaggtgatattcgggtcgattcatggagtcgagatcgagccagagtttgtcactgttgcggatgtctggtacacaatcaagacctgcaacaagtacctgctggatcctaagaagctgatgggctggtttgcacgctggatcaaacatattgacgagaaacaacctgaaatatgggaagactatgatttcaaccgccagctactgttaccttgccatttctttgatcatgcagaggctttccagcatatcacaagaagactcgtctacaacgccccaggccatatcacagaaatggccccgacagactcaccatcattcgagccgatgcatatgcccgccatcgtcatacgtaagttgatccagtcacagttttaagatcaaaggacgctaactcgcagaaagagcaattaaacgcagctagagggcgtctccgaacggttctccaaagatcgctttttggagatttgaacatgactctcgataaagctcattgtggctgtgcagcagaaagcatgtttgcctactttagagaattacatcacatcagggtcaagccgctggatagtgacatatacaagaattgtgtcagtgatattctcaatcgactggcaaacttcaatgaagacaatatggcaaagaggaagccatcggtgcagagatgcgtggtatgccccttctcctggaaacgcacggtggagtacgcacgaagactggtcgatggttactttcatggcctatgtctagattgcatgcagaaacacccagacgaggattctgagtactgggatcttcgtaccaccagattggtgtatgaccaaacttgccgcattacccacggcgaggcaacctggttctccagtttcatgggccatcgtaacaaacggctataccgcatacgttcctgagtgaacaggaagggatgaatctcgacattttttccgtgacgttactgatcatctgcccgggattttgctgaacaatcctacgcccatttctctttctgtcaattggtacccaccctctaccgagtcttgcaactatgtttatggcaaattccaatttctcaattgacggcagatactcgcaatgttagctgcccttgagccatgaattggcgaatgcatgttttatcattttgtttagagtaataatttgactgctatttgccattaatatctatttctctagaccgtatctttcaattctatgtgcgacacctacatacgacgtattaccctacaatatttatcttagacaccagtgataaaacagtcaagtttaaaagaacctgtgggatgagtgcgaaaacggctctttgcatacatcaaacaggtttcatgctaaatatgcagatgatcaatatggctaactgcgtaagaattgtcattgaaagattcactcatacttttattgtcggcttgatttgataagtattctatggtatgaatatcgacttatactggttgaatagagaatcaagattgccacttatacagatcatattcgtatacatagaaaccagtgtgataataaagcttttgttgttcgctgtaaacttctccctataccttgaatatacctactcatttcagtacgaccaaagagattcagagcctattactggaaaaagtaatttgaaacatgtctagcacttttcagattctctttgtgctggtattagtgggtgattttctttaagttcattgtggtcagacaaagatttgatttttttagaaaatatgaggttcagctaaatactattgaatatctaatgataatttgatgtgacctatacctacggtgagattaaaatgagatataagtggaatgtattcaaaagacggctaaatatacaaacggacaaacaaagaaacgatcaagctagacatatcgtgactcccaaacagttactgaatgttcattcaagtttgaattcctggcaaacactggtcattaagcgtgaatagaacaaagagctgcgtattcattgttgcatttttgccttcttcatggtatattacttcccaagagaccgagaaacatggagattcccttgagtctcttgaaccctaccctattgatctgatatagaaatcacaaatatgttcgaccaactggtgctgggagccatttttgccggcctcagcagcattggcatttggcattctgttccgttgaccggagtcactccttctaactctttcttttggcgcagtcttagctccctagaaattgcgtgttccattcacgagttacgcaaagtccatcctttggtcttcccccatgacgacgcaatctcagaacacgacctccttctacaactttcactcgatgcccaacagtacgaaaatgccaggctggccctggaacactcagctgaagctgtatcactccatgtcaacacccccggagttacagcaacaattttactcccgagtgccacagcgatgccgacgtcggtctatttgaacgatgtctgggcaaatgagcatagctacgatgagctgcaacagttccacccagcccagaataacacgctatatttcgccgtgatggctactctcgtcttggttatcctcacagtgcagataatgggctttgggatgacgaataacatcaagcagcacgtcgaggacctgcaatacgattattttgaccgaatgagcggcgtgcaagtgcaattcgacactctgatgatagagattcgacagttccgaagggaaaatgaacaagtacggcctgttttcgttcatctggcggaggccatcacaaactcctcggccgacctccaacattgtttgttacatattgttgggatgatggaagacaaatacacctcggggatgattaccattgaatccaagttggatgaggtcagtcaacaacaccatgatctgatgagaaatactgaaaatttccctcagattccgagacaattagcttggcttaacatcctgatggcgaagaacatgtccaacgacctgcctgaaggtgtacacatggaccagcctgatttggatttaagcaagagtcctagcatcgagcagatcaatggagctcaccacgccgcagggcaacccaacgggatttccaactttgaggggagtcccgttcttcagaatggaaaaaagaggactagttcagtgcaatggtcaggattggggctgacttaggacatgtgaagatctatttcgtatctgtataacaggggattttatttgcttctctttttttgggtgtatgatttagttgatgtcaagtgcttgggatagaaaagtttaatcagttggatatttcgttatgattctatattagttgactatgcctttcgtatttgtaagcgactgacaatcatgacgcggtttcttcaccaagatacttgcgacaggcagtcttcagcatgttgatgcgcctctgtgtatgaatgaagacctctcgatacatgtccagactctgctggacgacctcctgtcgggttttagtgcctgagcagatctcaagcattctcaattccatttccttgcgaaggaacggcttgctgagagacacactattagggagaccctcaacaacgttgtcatacccctccacaagggcaacacctaaacgggtcggaatgaattcctgcactgagctacgcccactgccccgttgatttatggcgacgtattcacgttctttgatcttggcaatatgctccgccatcgtggcatctgtaccaatcccgttggcatccatcaggccaatgagctcgggctcagtcagatagtttggagcagttgttttgccttcgaagatattggcttctgtgggctcaaagagctcccccagttcaaagttgggaagctgctggctgctttcccacttatcgtagacgtatacatccaagtagtttctctccaacacggtaaggccattggtgtggaagaattcgtcgccatattgaatttcaatttctgtgctctggcccttcgcgtcatcagaacagcaggcgaggaatcgacgggcaacaaattcataaaccttcttttcattggcattcaactggtttggtgaaacccaggtgacaggatgaataggtggatgggctttgtcattgtggcggccagagcgaggagtcctgaacttgccatcaataagtctagataggcattagtcttgtatatgaaacgcaagtccaataagcttactctcgagcgtattggccccatgactcgtcggggtattgcttttcgaccaatttcttcagatcgatcgctttgtcaaactggtccgtctcggttctgggatagctgatgaatcccttggtgtaaagtccttctgctacctttgaacgtgttagatatcatccactatgaaaatgggtttcctaccttcatgatagtctgactgtccaaacgaagaaatcgactgcccatcatttgcaggtctaccgtagtcaagggcaacggtcgccatttgcttgtaggcttctggttcacttttgtgactttggcttgctttgcaaccaaacatcgctctaacatcatcgtcacaactgctcggtcaaataaatgtacccgcttccagagaaagttgacctttttgctttcccggctgagtatgaccttgaggccccaaaatacttctggtttgaaattctggactctcaagtatcgatcgacaacgaaccccaaagtaggaaattggcaggatcctaacttgttaattcacttgcttatatctatgacgaccgacggcttaccatagctaatgaccttttccttcaaggctgccaccactgtttgtagttgtagagtctgtaggcgggtgaatgcagcgccgattcgaagatccagttcgatcctggcagatacagcactggcctgatattcgtcgaggttgactggttctagagcagcccgacgaacatgtctatcctcggatcagtttgagtagacaccaaaatcaacattacttacgctctttctatgttgctgaacttggctcgcttaacctcgatccgggcatttcctgcctttgcctggttacggacctcagaaccgatatgctcaccttcgcgatcacaatccgtccaaataaacagggctttagagtatttagcttgattccggatgttatccgcaattggtagcttgtcctagtgaggatatcagcatgcagtcaggacagctgctggaatttgctcaccttatcaacagtctcttccacgggggcctcgaagagtgaccctggaggacaggacatccagcccttgtactgacggtcaaagtccaagccagtcagatggccgactacgctggtcatagtgaccgagcagttgccccaggcaccgccaaaatcaaaatcaaattcataattcttcacgtatttattcccgcgaatcgcatgctatgctcgatgttagctaaatctaccagaaatctttaaaaggaaacccactgtttgaaaagcacctcccgataagtgagtggccactgcgcgagcaatggcaggtttctcagccacacataggattttgcgagccatggcgagctccaatctagatcacatggggttcatagtgatggtggtcttagtgtcctgacgtcgatcacatcttgttctggatgagaagagacgagatgcctgagacgcgctttggtgcctgaggcatacaatccattttagggacgctattcctaatcggggcaattattggccacttacccgtccaactccacctgagcaaacgcttctgtttccctttctcctctgcggcattttgttcccatatatagtacgataatggcatctttaccacttccccgtgtggactcccttttggattatacttcgtttcatctcaccgttctcccctacttgacccagctgcaatggctacccggaagcttgcgcgaagctggttacgatgtgtatagcttgcgagctgtctatctagctaccaaccctctggtctctgcgcttgccttctgtggaactctggctggtcttttcttcatcgcagccgagatcaaccggaactattctcaagtagaccggttttggagcattctccccgcgctgtataacgtgcattttgccctctgggctcgtttgtccggcatccagacacaaactgtggatacaatcgccgtcgttagtgttatctggggtgtaagttggctattcttccgagtctttacatctactgactgactgactgacgggataggctcgcttgactttcaactactggcgcaaaggaggatattcaattggatcggaggattaccgctggcagatcgtgcgctctaaagtgaacaataactttgtcttcatgatcttcaacctcggattcattgctgtggctcagtcactgctgctccttctcatcaccgctccgacctacatttttgttgtcgccgcatacaaccagggacccgagacctttggccttgctgacttggcattctcccgtgctgcgtttttcttcatcatcattgaattcttcgccgacgggcagcagtggaagttccagtctgccaagaaggaataccaaaccaacgcgcgtattcccgagccttacaaggaccagttctccgctgaagatcttgagcggggctttgttgtcagcggcctatggtcttggtcacgacaccccaactttgttgctgagcaggccgtttggttgaccatgtatttgtggtcctgctaccgcaccgagacttacttcaactggaccggtctgggcgctttgggatatcttgctatcttccagggaagtgtacgtctaaccgaaaagatcaccgctggaaagtatcccgagtacagcgactaccaggcccgcgttggcaggtttatccctcgcttgtctgtcaaggcaaagaagaccaagaaggctagcaagaaaagcacttaatgtgttggttgatatataaccagggaattggagaatctataccagattgattgacatgtttttgctgtgattttctgcactcggcgtcttacctcaaactatcgattttgacacaatgcaaactattttcaatcaatatgttcaggcactaatcactcattgcaacaaattggaaatataagatatattttgggacttcttcaagacatgtttatgcagcacaattcttcgtgtagcgagcagcttgcatgcgacaggcctgttctgcttcgatgctcgagaatagtcctctgaaagtcttactgcagcattcattctctctttatcgaattttcccaccgcccagagaaccaagactccgactccggaccaagatgaactggcatcatagccattcgatagtctgatcctctcaagtggatgtggttcttcccacggccattgtcttttcccccgtcgccactgtctttctctccgtggttacattggaatgttcggctgcacaacgccatcttctctatgtattctttcagcgatgcgcacttgtcatacatgatatctatgatagcgtaggcccttgactgaacgcatcttcatgggaacatctctatcgtatatcctttctagaactgctatgccgtcccgtgcatggaatgcttctagagcatacccaaagggaataattgaggacataaagcgtataaagtgcaagacatacacacgtgttgggtatggcattgctaacaatggaggattagataacttaatagccaatatgtctaatgcaacgttattcggtgagttttacgataatggttcaacagtatctacacgtaaaagacatcccaatctaagacatgtttccaaataactccatattatacactcagttcaagttgtacatatccagttagacacggatatggacaggggtaacaaacgagagagaaaataaaaaaaaagacgatcttcttattgagtacaacgggaggaatgggagaaagggtttgtagtcgagggtcgacatataagaggacgtgggagaggagaagaaaccggggatgcaatggataaatacaaaaagaagagaggctacagtgatatcatgcctcccaaaattggaccaaaaccaaacggaagcacaggaatgcaaagaaacacaattcctccataatctatggaggaggaataggtgtctcgtcccggccgttgttaccggaagtttcttcggggctctggtggtccgatggggcaatggtctggccgcctgtgccatcgaagtacttggcgaactcgccagactcggggtaggggcgcgggccaagaagacgaatgaggtcatcacgtccaagaacctctttagaaagaagctcctcggcaacaataccaagctccgtccgcttctcggtcaggaggtcgcggcactgcttgtgagcctcgtcgatgatacggcgcacctccagatcaatagagcgggcagtgtcctccgagaagggcttgtgaagttgctgctgtgcgtcatcctcgtagtagatgaaaccaagcttggacgacatgccaaacttagttaccatggcagtagccatgcgggtgaccttgttgaaatcatcactagcaccactggtcacggaatcgaagtgcaactcttcgctgacacgaccacctagagtcatggccatgcggtccatcatctggttgacgttcatcagatatgtgtcgccgccagctggcaggtattgggcatatcctagtgcgccttgtccgcgaggaatgatcgaaaccttcagcagcggatcagcccacttgaagtaccaaccacagatagcgtggccagcctcgtggtaggcgacggtccgcttctcctcaggggagagcacaagagacttcttttccaatccaccaacaacccgttcgatggcttgctcgaaatgtctcatgacaaccttgtcggcattttcacgggcagctatagggagaaagtgttagctttgatagatacggagaaatcatgcataagaacttaccaacaagagctgcctcgttcacgcagttggcgatatcagcaccagcgaaaccaggagtcagagcggcaagtctgccctccatgtactccaagttctcgtcggtgacaatcttcttcaagtaaacccggaagatctgtttacgaccatccatggtaggtcggtcaatggagatgtgtcggtcaaatcgtccgggacgcatgagtgccttgtcaagaacatccggtcgattggtaccagccaagacaaccacttgctcagaggtattgaaaccatccatctcagtgagaatctggttgagagtgctttcacgttcatcgtttccaccaccaacgttcgactttgctcgagactttccaatcgcatcaatttcatcaatgaagatgatgcagggggtattcttccgggcggttgcgaagagatcgcggacacgagagggtccgacaccgacaaacatttcgacaaactcggaaccactgacactgtagaaaggcacgccggattcaccagcagtggccttagcaagcaatgtcttaccagtaccggggggacctgagagaatggcaccacgaggaatctttgcacccaacttctcgaaccgctcgggttgctggaggaagctaacgaattccatgatctcaaccttggcttcgtccataccagcaacgtcagagaacttgatcttgatatcggtctcgtggttgaagcgtttggcacggctctttccgatgccaaagattccactttggccgccggcgccgccgccagcacgtcgagacatccagaagacaccaccaaggaagaggatagtaggagccaatgacatcaagacgccgccccatggggtttcatcgtgataggcgacaggaatacgttcatgcgagggaataccgagttcacgctgagctgcgtcgatcttcatttcgaagctgtcgacggaaccaatactaaagtagacataggaggcaggctgaccatttgaatctgcttgagcggcagcttcgcggttgagatcgacccgaaccttggtgtggttcaggacggtcaatttatccacgaggcccttctcgaggtagttcgccctgaattcttgccaagtgatttctctacccgcactatcaccggggaaaaagctgcggtaggcgtagtatgtgacgagagcggtaacgaagaacgaaacgggatcaaagcggaactcgagaaccttgcccatgttcggcggcaccttgcccttcttgtcaccctgttgcttcttcttctcttcttccttctcggaatcttgcttttccttggtatccttttccttcttaggatccttgggatccttgggatcgtttggcggttgtgcgttggattgctgttcgccacccttcgccggttgctgtccttgttgatccttctctgagtccttattgaagtggacgctggattcttcgtcacgtttggccatatcactgcgcttttcagcgggggtgcgcaagtctgcgataccgcgctttgcgttttgtgcttgtctagccagacgctcatcaacatcgtaagttgagacttgccacaagaatcgcgacatcttgatacgatccattaatgtcggttcttgattcggatcgatatacgccctgacttccggtaacagtccatttttcatgatgtagtttcggatattggtccgtcggtccacatccatatcttcaagccatgcatccaccattttcaattcagcgtcggtcagaagtgacttcgggttctttgtttggtggtcattgttgcggccatctggtgtattgtcccggccgttgtcgttgggtggtgtcggaccttgcgtggcgtaggttctagcgcggcttgataaacccagatgtgagggtcttgacgggcgcacacgcatagaagccagccccgtgcgaccggttgaatccgcggctttcctcaagtagcgagcgaaattgcctggccgtcggagcagagtagccatggtcgaggaatgggagccccgagggctgcgagggcgggggtaaaaggtggtcaatcgagtttagagataatggatgttatcaacaatccatcaagattaggcgtgagagaaggaattgagctgggagttgagaagctctaaggcatccaggtccgaggtgacgccgtgtggttccttccagtcggttctaaaatttcgccgatccggctgagtcatcggaagcgcggaggaattaactagcttaaagccgtgattactctaacgccgtcgtttatgaattccgttattgaattagattgcctaaggttgatttggattggagacatgtctgtacatagtcctataagtaaggccaacccctgcgccattcgctgcgtaatagaaacccataattatcctggtcactccataagagacctcggggatggtttcgaaataagaagaggagcgcttcattatacaagaggtgtggagataatttagtgtagagagataacaccggaaacaataataccaccgccatgagctacataagagatgaaggtgacttcggtcaatcatacagtcatcatcactgcccaggcagtggcccaccgggaccagctccttcaaaagcaggaaagttggtggacatatccgcccaatcccactcaattgtcattggcatttgccagagatcttgtgggacaaatggctgctgaaatggtgccatgccggggctggcactgaatgggtgttggtcagagaatccaacattgggcatttgatcaggactcagcatgtctgagaactcctgtccaatgccaggcatgggatgaacattgcttgggaggtcagcggggagactacttgttgggggcatggcagtccccgggaatggtcctcctgtagcgggcgagggggcggcagccgtagggttggtaaacacggagggagagaaggatgtagaggtgggtggttgttgtgttcgtttggccgagggtgagtttgtcgactgttcttcggctgcgcctgtggtgtcttctgcattcttgcgtttctttcgcgaatgagactctttttcggttttatccaagaccaccttggcaattctctcgaattcaccgcaaaggcctagcatacgcttgatgctgccgtttgattcgtcggacactagggtagaaaggaagctgactaccacgctcattaatttaacatcggatcgagcacgagcatcggtgggattctggaggatgttggcgaaaagagttacgagggcagacaccgggtagtagagaatcagcctggtatcgagttagcaactgttcgttttcacaattctctgaaacgtaccaaacacaagcaaagtctccttgtgggatatacttgattagattaatcgatgctctggcagcagtgacacacaaaactgccgacaagaataccctagggttcaagggccgtgcatttaagccttgtatggcatagttggatagacggcttgtccaatacccgtgatgaaccgacatccgatgaatggtggtcaggcaattgtagtaggcaaaatgtagaacaaccatgtggatgatgaggggggtgtgggtggcttgaatgtcgtattcggggcggaagtcgataggaatgctgtctttccaatcttccagctctttgtcaagctcaccgattgtattgagcaattcaccgtctgattgtttcgatgctttggcggaataaagtcgcttgtatactctgctttcaatggtggcaaattcacacaatgaccggaataggttgaacttgcttctaccatcagatagtggcacatttccaacattgtccggcggatcttcgctcggtaactcgacattcatatcatcgtcatcctgtactggaggtcgaccagagcgtaggcaaatgctaaggaattggtcagtattggagataaaggtattcgggggtcggaaagcagctcatactctttgtcaagaagataggcgatccagaagactctcttccgctgctcaacttcaacgacattgaggccaaagccagagccgcgtttgtgtagaccaatgctgtgggaaagtcgaatcgccgcagcgactagaaagaaagcaggctgtgggttaggggttccttgaagaaagagtgactagaagagtatgtaagacaaagctacaaataccagggtaggaaactttaccatgcccaatagcgcttgcacgctcaagagatccgtgttgcgcattgtaagctcggtcaaaactcccatggcgttcttcaaataaagccaagctcttttatcctcttcgtgtggcaccaagttactcataatccgcagcctgtgagatatcgccagaacaacatttatgcttgcccaccagcccgaaccctcgtaggggtcgcgggaatattgccgctccaccaagtgcatgaatgtcgcttcgtgaaacagtgggaacatgcaattgaaattttcaaagaagtccttgaacagagaaagggcttcttcctttggcgggagaggtttgaacacacgccttgcgaaaatatcgctgaagatttcgggcttccagtacatccatttattgtcatcgacatatgctgacgaaatcatgtcttggaaggatgtatcgccggttttctcattgacccattgaataccctttggagagaatatagagaatccagaggatgatcctgaggatgttagcaagctagcccagcacagttgcgcgaaaaagcctaccaatataccgagtttccccgcagttgttcgtcaccaaagaacacatcatatccgacagtgcctcaacttcggtctccgacttttgtgactctggtgatgtagcggctgtctgggggctggagttggattccatacgaggtgtggtttggtgggagcttgaagcttgttgagctgcagctgcttgagccatgaacatgctggagcttttcgttgcgttcaacgcattcgttcgatccgctagccgtttctccaatgttccgagatctgtcttgccgccatcgtcttctgacaaaagacccgacaaacgcaacaacgactccatccgacccagtcggttttcaagaccttcgatgtatttcgctctatgtaagaaatccccaagtcagatatagaaccccatatgcaatgaagtatacaagtatacataccctttaggaggatttcgcttcttctccacttgtgtgaagatgcattccgttttgtagttaatgcagtgagaacattttggcatttttccatcgcatttgattttcttcttccgacacatatcgcacgcctgtttgctcattaggggtgttctcgatatccgtaacgggtaatgatcctcactctcgcgatcctccgtctcttcgcatcgttggtctcgtcccccgcgcctaatgacgaatcatcgtacatagatcccgcctgcatctgagacggatcgtagctgaatagctgtggtgtctggttcatcatattaggctggtcgaagcccatgccgtcgccgtcccccaggccatccattttgtgtttgaggggccacggaaactccgcggagtaaaagtaatagcggtgataagtaacgggtgatactgcggggtgctgtctctcggcgcaaagcttttttgtttcgcccctgagagaggagagggtgcgctatagattattgaagtgaatgacgcatgcaaggatgggatctttttttcgagggagtagacaatgaaatcactgggcacaattaccccaaccttggaaagttcggggctttaggtaagaaatgactcaaccacacgtgaggacaaggatctgtgtgaatcaatatgactccaactgtggcagtaagagcacaaaatgctctaccgagttacgctatacaagttgctgcctcgaagattattttgtggcatgacggaaccccgaaacccgaccgccgagcacacggtcccnnnnnnnnnnnnnnnnnnnnnnnnnnnnnnnnnnnnnnnnnnnnnnnnnnnnnnnnnnnnnnnnnnnnnnnnnnnnnnnnnnnnnnnnnnnnnnnnnnnnnnnnnnnnnnnnnnnnnnnnnnnnnnnnnnnnnnnnnnnnnnnnnnnnnnnnnnnnnnnnnnnnnnnnnnnnnnnnnnnnnnnnnnnnnccggaaccccgaaacccgaccgccgagcagacggtcgatttcgtccgatccggggcttgggcttccgttcagtctctggcaatccactctttggttgcgccgatcaaaggcctttttgctctttgtgtatcgtaattattcttgggagggtgtggcgttctatatggggtaggacggattccgtatccgggccttgtaaccggagagcagccctacaacatacgtgtttcttagcatccacctagacaatagttgaccttatggttacctaccgactccgtagttagttaactactccagagcttggttatgtatgactaaaactcaccatgagcgacaatttagaggtatgatctgatgtgatgccgcggattgccggttctatgctggatctgtcggatagatagtaataaaagtacattcaatgaagagcggcgatctcgtagggatatgtgagaatagtacatataatacaacaaggttcgtaaagagcagtcctgttcctccgatcttgtaaatgccaaaccaacgccacgctatatgcccaaaatataatgaccagtttgtcatgtcgagacctaaattcgctttcccatcgtgacccgagggtccatgctagagaagaaagaagtcaaggccgcactggcaaggtctcaaacatgtttgtcgaggaattccttcgcctcgttaattttggtggccaggtatggactaccgccgcgatcggggtggttgagcaacatgagctggcggtggttcttgcggatcttgtctttggtcaaagttcgttcactgagagatactgtcagttctggcacatcaaaggtttgtcactagcacttacgcaagttgtagaatcagagacgcttcccgacggttcatgcgcggttcgaatcctctgttatacgttagtcaatattccatatgaccacaacctggcgaaatgtccacgaaccccttatagaatgcctttccggcagcgttcaatcctcctctggagcggcggtaagcgaccagaccggcgcggccctgtagacaatgagttagtcctgtgctgctagcaaatcactttttaactcaccagaaaggcggttgtggcaatgccaaatccaacagcaaggatagaggccattttgtagatcgagatagagaggtcacgaaaacgagatcaagtcggttggaccggggaatgagcgaagaggcgccgggatagaaaagtcagcgcgggtgtccccaaaagggcttagcgtggtctgctccaccattcaggcccgaagctacagaaaaagtttcttgcgactcaacgaagacataaccaacaccactctacaaccatgcggtaagttttgccgttaatttttgtctctatccgttctacggaatgctaatatcattttcatctgcagtgttgaaacttgtcacttctgttcccgcccggctttcccgagtaagggaatcacattcgtccgcaacgatgcccgacaatttcgtttctgtcggtccaagtgccacaagaacttcaagatgaagcgtcagccccgcaagcttaagtggaccaagactcaccgtgcctcccgcggaaaggaaatgatcgtggattcgtcgcttgttctgtcccagttcgccaagaagagaaacgtccccgtcaagtacgaccgcaatctcatggctgctaccatcactgccatggagagagtcgaggagatcagagcccgccgcgagcgtgtattcacgaaacgccgcctggccggaaaaacctcccgcgagcgccagcgcgaggcggaccgcaaggtcgtcaacgagggcgagcacctcatccggaaggaactccgggagcgcgaggagggtctccccatggtggccgagcagagcaaggtttccaacagagttcacggcgaggagagagttcgccagaagcagaagagcaagcttttggtggatggtggagtggaggagcagatggatatcgactaaattttatcttgggcatctatattttcttttgttttgtgctttctcagatacgacacggttcctgcagcacgcagattttcggagttgggcatgctttggtgttttaaaagcaatcaatgtttttcatcatatctcatatccagtgggctgttagcctcttactgcttgagaggctaattaaaatgtgtttacaatgacccaagatgttacataggttgctagtttgctagtcagtacagtggccagagtggtcaaacgaccataatgagatctttggagaacgaccccaacaaatatcccatttaggcaaatgctattaacctcgtctacaccctctatcaacaaagttctcttagtcaacccacctccctctgctatagacacagagtagcctcaagctcaaccgtctatagtattttaagcaatgattcaacataaaatcaatacttggctattgtatctatatacaactaggactctggggacttaagcggatcagggtcgttctccgcaatccctgcaaattggaaaacaggcgacccatccaagacaacaagagtttgtaccctacgtacatagggagaggcgaagatcccagtatcaagataggtagagtctcggtagaccagctaagataaaacgatcagcaaataggagcacacataggtggaagacataatcagccagcttgtgatgctacaaggatctgaaatcaggtagccatggtagccatggttgcagcgatggcaggaaggattattattgtctcacaaacttccaaagatataggaatatatatctagcaggagtagctagagggagatctttggcagcaaagaaccaggcagttagctaataggttgtttgaaactctcataaaacatgatatgagaaaagaggaacatgttggttctgtctgataaggaaagaagatgaagacagtgagagagggagatgaagaaggggaaggtgaatgagggactatgtcaagtcagtccaacgtcagaactgatcgaatagccaaactctaggatatggaagaagaaccgaggtcgtcaggtatacaccatgaatgcacgcggaacagcgttggaagggttaaagataggtagtctaaagaaatagattgagggttatgtagctagaagctagatgatgtgcgggctaaatgggaggtaaatgatagaaagaagagacatcgaagaaatcgagcggtgttcttgtgccgcgcttgatatgatcagtaaaatactaaatacaatacaagaatggccggcaagaagatgctgatggggaaagcgagaggctagagagagaaaaatgtgaagcaaccagaggtaaaaagaacaaagcgcttctctggtaagcgcaaactcccctattcgatcatccttccttccatatatgtagatcaaaccaggtcctgtagtagactgcgccaaacaccacctccaagaggaggagaaatgaaactcagaagaaaaaaagcgaatgcaatggtggaggttgatgatggagaatgataatagacgggggaaagacgcgggtgggtatgaagtagacaaaagtagatgagactcatatagacagggtatagtctcatcgaaaatcatctgcatggaaataaatatgctaaactcatgtactgttggatcggagcaatgcctggaaataattagccttgctgtttgcgggtggctctgaacatacagctaacgtacccgctcgtcgatgacctcttccttctcttccgacggactgaccacactccctcgagtaatgggaccagaggttgtgatagaccgggaatctataaccgggcgaggggacggtaagggctgctgctttgaccgttgttgttgtggtggtggcggcggcggttgttggttctcattcattgagtaattggggtgcatttccccactgctcgatatcctagactctttgctcttctccaatagtgacccgccaagggtagcacatttgaggatagtttgcatcatctggttttgtttgagaggtttggacaaatattcgtccatctgggcctggatacacttctcccggtcacccaacatggcgtgggcagtgagcgcgataattggagttctttgaagtccactctcgcgttcatattcacggatcttgccagtggcttcaaagccacccatgactggcatctgaacatccatcaaaataacatcataacgacgtttcttgacagcattgacagcttccaagccattaccaacaacaaacacgttgtggttatgtttctgaagaatcttcattgcaagttgctggttcacgtcgttatcctccgctagaagaatgtcgaatgaacgtgagttgtctgtggtgattggcgtcgaccggccttccaaggctggtagcataccgttgccgagatcaatcggctgacacggggtagtcatatatgagctgatacccaggtccaaagccgacttcaagctcacgcacactaaaggacagaccaaaacaatcggaatgtacttgaactcgtcaaaggttcgcaacacccgggccgtgtctaccgagtcaacaataataacatcgtaggcatggcctgattccttgccagaaggatcttggatctcgggcgggggaacatgttcctcgttccgtacaaccaacggctccaggtcaatcttcttcaacatcttcatgacattggtagcttgagcaccgttctgacccttgtcgatgaacaacacccggtggttcttgtacggcaagagctgattggcgataacgctcaaagactggtccgcgagttttaccacacaggtgaagtggaaagtacttccatgtccatattcagaagtgacccagacgtcaccacccatcaaattcacaaggcgcttggaaatcgacaatcccaacccagtgccaccaaatctgcgggtggttgagccatcggcttgttggaaagtgtcgaaaatgagatcaagcttatcctcttcgattccaataccagtatcagctactgagaattcaaaggcgtattcgtcggtcgtgcattgctctctgtccgactttcggatagtgagcttaacctcaccatgctcggtaaacttgatagcattgccaacaagattgaggatgatctggcggagacggaatggatcgccaatgacataatcaggaacggtgttgtcaacttggtaggtcaaactcaagaacttctcgttggccttcacagccaacgtcttgagagcattgaagacagtacctctgacggtgaatggaatgctctcaatgaccatccggttggcttcgatcttagagatatccaaaatgtcatcaatgatagtcaacagactgttcgccaagttgtgaacgacattcaacatttctcgggtataaggcttgagatcatccgtatccaaggtcaactgggtcattccaatgataccgttcatcggcgttctgatctcgtgcgacatgttcgccaagaactctgatttggtgcgattggcgagttcggcagcctccctagcggcagtgtttcgctggatactgtcccgtaggttggaaaccatcttattgatctttcgcttcagttcgtccatttcaccagacgcattgaccgtgatcaacttggtaaagtcaccgtcagtggcggcatcggtaatttcaccgaaagcgcggacttgggatgtcaagttctcggccatggtattcacatcctcagtaatttctttccaagtacccgcgataccctccacgttggcttgtccacccatcttgccatcaacgccgacatctcgggcgaccttctttagctcagtggcgaatttggccagtcgacccaccatgtggttgatagtgaccttgagcgtaagaatttctccctgagcatgcacttcaatcttcttgctcaagtctcccttggcaatagcttgcgtgacatcggatatacttcgaacctgagacgtcaaattctgggccatggtgttgacattgtccgtcagatccttccatttgccttccacgttgtccaccttagcctgcccgccgagagtaccatctgtgccgacctcacgagccactttgctcacttcaaaagcaaaggtattgagacgatccaccatgccattaatcgtactcttgaggtcgaggatttctccttgtacattggcagtaacctttttggtgaggtcacccttggcgactgcggtggtaacgtccgcgatctcacgcacctgcgtggtcagattgttggccatacggttgacgttttccgtcaaatccttccacgttccttcaacatcattcacagtagcttggcctccgagaacaccatcggtaccgacttccttggcaatcttggtgacttcttgtgcgaattgccgtagttggtccaccatggaattgatgatgttcttcagttctgctatttctcccttacagttggcctggaccttctgcgtgagatcacccttggcaacagcttttgtgacagtagcaatatctcgcacttgcgtggtaaggttgttggccatggcgttaacattaaccgtgagttcgttccacattccctgcacaccttcgatttgagcttgtcctcctagtacaccttccgtaccgacatcacgcgcgactcgagtaacttctgttgcaaacgtccgaagttgatctaccatggtattgatggtttgttgcaactccagaatttcaccttgggcccggctctcaatcttctggctaagatcaccatgagcgacagcggtagtcacggcggcaatttctcgcacttgatctgtcaaattcttggccataatgttgacgttctccgtaagctctttccaaataccatggacgccagtgatctgagcttgtccaccgagtatcccttcagtaccgacttcgcgtgcgacacgggacacttcactaccgaagacttgcagttgatccatcatagtgttaattgttcgtttgaaggtggcgatttcagggtccatttccagtgggtggatttgaaccttcatagataggtcaccgttggcgacttgagtgatgattccaccgatttcacgcaaagctttctggaaggcctcgttggcctgctggtgtttgcgcaactcgcgctcgagcagaacgacatcctcattttcgaccttggtaagagcgcggcgagtgtgctcttcctgtttctgcaattcctcgcgaacctgggcaataatatccttttggctgcttatctcctcggcctgcttttgtacgtggttgcgaaggaagctaatatcctcctcccgcacgacacgcgtgccgttatcatcttcgtcatcggattcgtcgtcaatttctcccaggggtggttcgtcggccgcgggaaccgggttcgctttttgctgtgacagagagtcagaatcttgaccggacgacaagcgagagagcccaaatgtccacaagaaattcctctcgttggcctctccagcagacggggtggtctggatggggtccgtctgctgttggaaattgtggtgactgacagcttggaattccagatggtgcacgcggcgcaccagggcctcaagctctgcttcgaaggctgccttggtgggactgtattctccgggaagtttggccgatttggtaccgttgaagaactggaaatcaaatgagggcgaagaggaaccggggacagagtcgtctcttgctaaattctgcagcacggcagtcgcggccacgagtgtctcgtccacgctagccattgtggcctacataggtcagtctcgtagtacaactaacgtacaacacatcttatagtaccagcacccgagctggaaattatgggatggggttagggtatcggagagcgagcttaaggatcactcactggcaagtctggatcctaaccggatgacagagatatagtctaattaaggcgacatgaggggggaagagtccaaagagaagacaaggaataaaatagacacccgagtcaacgataaatatgaaagggaataataatatggcaggtcgggaagggggaaaataggtggataagccctggagagggttatgtaagccaccactagggatggctctgcgggaagaaagagaaaaggaacttgggaaagaccgagatatatagagaaagatccaaatataagggaaaaaaagtgaggtttcgcggatgagaagagaaaggcgggaattctaagatttggggatgagggaggggggaagagattttgaaaggggcggtgatatgtcgcctcttttgggttttcttgggctgtttttttctgtttttttctctctttcgatgtctctgatctttggggggaatctatcaatcgccttcgcgctgtaatagtgcaaatccactggcatcaagcggatcaaattgggtattcaccttgacggagtcctgcccaggtgactggatatggcgcacggactcgctctattatagtttcatcggaagagtatatgaaggtactccggatactatatccaaactactcacaaagagcttgtatgcatctgtacactcaggatccctatatcgccagagaatatgtcgtacacaaatcaaatgtgtttcatgtggaggtgattgcctctgggactagtgccgatcacaaggtggctccggttcgtggtttcctttctcaatactgcgtactctccatatccctggaggcaaagataggcgagacagagtttgccgaacaattggctgggatccagcgagatccagtcggagttaatctgagcctataggagatcaacgagaatgtctcatcgttagggtactgccacagatccatagtttggtcttttttggtggctgagccgtccggcttagcgtctcccgttggccgaggtattcataacgtcgattggtcacacgggacctcgtgaaagtgaagatgttcaatattcggtaggagtactccgtactcgtacctggatcatattgactatatgtttcatatataaaaagagggaaatgtgtctcaatgggtaggattttaggtggattttgtatggattaaatggaatccagggggaaatatatacccaacgttcccggcagtagatagtgatacatggtggtatctgttgtatgtagtaaatatgtatttatcttctcgagagcatgtcaagctgtcaactggtcaacggtcaacaatggcgggggtcaaacggcacaagtggtcaatgtaccccgccgtattatcttttggaatcccgcagagtcataattctacaaaatatcgtcggatcaaaagaacgcccttcaaaacacccgtcaaaaattgactctgcaggagtaggctgcagccatggcgtccgacttaacaaaccagatcttggacgccctgtccgcgtccgatgcgcccatcctctccagcgaagctttcccctccaccccctcattgaacgttaagagtgcgctcgatcgccttgattcccgccagatggtcgaatatgagaccttggacaaggaaatcgttactctcactgcggagggccaggagattgccactaatggcagtcacgaggccaaggtcttcgccgtggtgcttgctgctttggacggattgaagatctccgacttaccaggaattgtgggcaaggagaatgccaaagttggccaaggaaacgccttcaagcgtggctggattaagaaggataaggatttgctgcgggcatccacagattcgattgtcgacgagacgcaacagcagctgctcgaggttcaaaaaacaaagaacctggacgataagaaggccctggctgacctcaagcggagaaagttggtcggtctggcaaaggagatttctttcaagttcaccaagggtcccaagtacgcccgagaattcgtcaaggagcagaccgacctcaccccggagatgatcgccagtggctcgtggaagacggcgcatctcaagccctacaacttcaatgccaagggcgccccgactccatgtggtacgctacacccgctgaacaaggtgcgacaagagttccgcaacatcttcttcgagatgggtttcgaggagatgccgacgaaccgcttcgtcgagaccggcttctggaacttcgacgctctgtttgtgccccagcaacaccccgcccgtgatctccaggataccttctacatctccgatcctgccgtggcagatgctcctcgcgaggatccccccaacgacccccaccgtccagcccaattaaagtccgagaagccacttgactacaaaaagtactgggacaacgtccgcgaagtccacgagcatggaaagtttggctctattggctaccgctacccctggagcgcggatgagtcgcttcgcctggtgctccgcacccacaccacctccatctcgacctacatgctgcacaagctggccgccaacccccggccggctcgattcttcagtatcgaccgtgtcttccgaaatgagtccgtcgatgctacccatctggcagagttccaccaggtcgagggtgtcattgccgacttcggtctgactcttggtggcctgattggattcatggaggtcttcttcgccaagatgggcatccacaagctgcgcttcaagcccgcctacaacccctacacggagcccagtatggagatcttcggctaccacgatggtctaggcaagtgggttgagatcggtaacagtggcatgttccgtccagagatgctggagtccatgggtctacctaaggacttgagggtctacggatggggattgagtctggagagacccacgatgatcaagtacgttgcatcatctacctttcgtttacatttactaatatctcttaggtacgccgtcagcaacatccgtgaactcctcggccacaaggtcgacctggacttcattcagaccaacccggctgtccgtctcgagaaggattaaacagggagatactcatagaaaaaaagaacgtgcttttagttgtgtcttgcttgtaatcacgagtttatgtcgaaggaaacgtattacatatcaacgatggacaggttgtgaatacttggtagaaaggctctagcgtagttgatcaatgtagatacaaatgaaagaaaaagaaaacatgatattgaacatgtaatattcatcgtgcatgtgtctacattggatgtcctgcccgtatctgtgccccagcgcgtggatctctgcagcagtggctcatcaggaggcaaagctcgaaagcataatcttcggcaacaacaagtatttcttacctcctcgctcatggagatggagacaccgaagaccaagaccagcgagccagtctggttttcgagtccccaaagaatgaggaggtcttgatatgccaaaaaggaaaaagaaaaagagaagacaggtagacagagactaagaattatatgaaagggatatcatttcgattttttgacattgcttttttttgtgcttcatgaggttgggcgggagtcttataacagaaagagaacaggcggggaattcgtagagaaaaaaaacctgacccattaagtcatcgatattccattcatttcgagagataggtaggaaaacaggagtttctcagaggagaaaaagaaaaaaatgaactaaggaacataactatatcccttgcgtcccttttttggtcttgaaaccaactccccgaacacggaccatcaagccacggttcctctgcagccaattagccttgttgaacatgaaacatgcggaatgtaatgtagatgaccatcacgtaccatcaaatcaacccgtaaacaccgcccagtgaaaaaaaccccacattgctgtggatgatttagcgctggctggaggcggcccacacgttcttgaggtagccatcacgctgggtcaggcggttgaaggagtcatcgctctcgccgcgggcgcggatgaagccgcaaagagcgtaggtctggttctcgccagtgtagcggccgttctcgtcaaccttgccgacggagagctggacagaggcgtggtcgttggccttgatgatgcggttggtggcgctgcacttgcggggcacgtagctgttgagaaggaggtcaagttagtggtctgggttcttctctgggggtttgcgagcgaatatgttcccctccaataccctgtgtcctggtttttctgatggctcgccaacgatcgcaatcacgcgcgctgagtattttttttttcaatcctcgcaatctctggtcacacctagtccatctctttggcttgggattgaggcgggattgctgattgtacgcggccacgcagaaacagggtacagggtatattgggactggaggaacgggtgtaaaatccatagcacgtacagatcgacgatctctcccttgtcgttctccattttggcgggtttggtgttggggttttgacgggcgacggtgaggttggaggtggagggtttttctgccgcacattaaattgaagacctcaaatgatttgtgtgggtcatgtgaccctttatcgagggctggcgtggccgaagtggggtcgcgtgggtttaacggaagccgtactaaaggccgtggcaatttcaactcttaatgctcatagtatcgattgcgggatatctacctacggggtacatatggactgatcgtactatgggtaaatatatgtatgtatctatatatcttacaggttactcttttccctctcttttttcaacacgtcctttttccatccaacagccacctctcgtgcacttccttttttgaaccgcacaagaaccactctctcggactctcctcgcttagaagaccctttcagctcatgcccgggttcattcagacccaacacagatcgcccatcactggtcatgagaatagattttggggatatgcacttctctgtccatggaggagagccagaatgaacgaactcgacaagcgcttgacgacgcttctccatttcttccacggaagcatctgcacgaggctctctgtccaggaatcctgacaccaaatgtaaaagaaggaactgcggcgggaatagaataatttcagccttttgagcacgactaacccattccgaggcgggaagaaactgtgcctccgtaacctcgattccaccatcactcgttgggatttgatgctcctcgtgttcgccttctgctgggagttggtcgaggattttcttatccacgttgacgggtaaaggtaagaaatatagatacatctgagtagtgtatcgcttaggaatgttggttggcgtaacccagcgagtaaaagggattaattggcctgtagagtcagcgtgctgccctcgggtgtcaatgcgcagaatgggcacttacctatatcgggctcagcatcagcgctttgctgcttcaaccattcatcaaaagtggtcttgttctgatgaatgagtcgtctgccggcctctcgggtaggttcgtcgacggcaagcatcttcccggagctgcggtctttagctagaagaattccactctcttcaaagagttccctgatcgctgcacgtcggtaacttggggaatcttcatgccgtgctagatctccgggtggtgggcattccccatcttgattagacaagttgccaccaggaaagacatgtgcagatgcaaaagaggtagaggtcttcacgcgatgaagaagaaggacctcgttctttgaagatataagaagaacgctatataatagttagtacccaattcttttttgggggaatgcctgacatcgcgccgtgaatatctccctagtcaatgtgtcatgtggtcccttgcgcttacctagaactaggccgggacactgcgggttcactatcacgtttcgggctcgacatcttccgaggatttgaaggaagtgtagttgtgtattgtctcaaagcaggtttacagctcgggcgcaagggctggatcaaggcaatatgagatgcgcgagatgtttgaaaagcaaggccaacagcaaattgaagaaccaatcgctgtggtaggtgacaagaaagagatccttgacagataaaggacatcttaaatcttaaagcctatgaacggcttctcaatatagtaaaaaaagcaaagagtcgggagttcctcggtaccccgcatgaagcttgacctcatggagcttaaccgaatgcaacgccatgtgctcgggcaacctccagcacttttacaaaacctctacttgatgtttacggttggaatagattgagagaaaaataaaacgtgttggctcattaccagaaatggcgtaaaatcttcaaatcgtaaaactcctatcctgtacccttatttttaattttcaaggccccatcatccatctgggtgaccccgataatatatattcacgaagtccagtcaactcttagaagcttggatcttacgagtaaagcttcttgtcgtagctgtggagaccgtggacgttaccctcggtcatagcgctagcacttcgcatctcgaaacgcacagtgcccttgttgacaccgtcgtgcatatcggtcaggctcttgacaccaatatcctgcagggagtgctggacaccggcgatgaggtaaggaataaacttggtgacggatccgcggtcaaggacggagccagcgacaccctgggcaacaaggacgcggtccttctcggagaaatagcgagcagtaccagcgttgctggccttgctgtcctttccatcaccaccggccttcttgtcctccatggcggcaatactgcccatgccacggtaggccttgacgagctggccctcgttgctgacgaagtactcaccgggagactcggtggtaccagcaagaagaccacccatcatgatggtgctagcacccatagcgagacccttgacgatgtggccgacgttctggataccaccatcggcgatacagggaacaccgaagcgagcggcaaatgttgcaacgctacgcacggaagcagcctggggacgaccaacagccataacctcctgggtgatacaggcactaccgctgcccatgccaattctcaggccatcgacaccggcggcaatcaaagcagcagcctgttcacgagtgacaacgttaccgccgataacgtcgacctcggggatagtcttcttaatgtacttgatcatctcgatctggtacatagagttaccctggctagagtccaggataacaatgtccaacccagcttccacaagaagctggaggcgcttcttgtcctcctcgcgagtaccaatagcagcggcagcgatcagctgcttagagtcggggagcttggaggcaagggggtagtggaggttcttcatcagatcagagcgggaaagcagggcgacgatgttgccgttaggatcgataataggaagctttcccttcttggaccgacgaaggacttcgttggcttcggctagggtggtgccggccggggcagtaacaagatccgtggccataacggcagtcacgggctcgtcgagaccagtgtggaactggatgtcacgcgaggtaaccattccaacgagcttggacttgagggttccgttctctatgttcaaacattagcatctgctgtcgaaagatcatgtgagggtaatatccaaaaagacaaattgctcagataaaatctggttctctacagtgcaactttcgttgctgcagtggaacgaaagttataattaaaagaggatggtcatcatgcaaagtggatgggcaggtgatgggagaagtagatgtggatatcttaccagtgacagggaagccaccgaagccccacttggccttcagctccttgacctcaccgacggtggccttgggagagatgacaacggggtccagaatgaaaccattctcgtatctcttaaccttacggaccatctctgcctgatcctcgggggagcagttgtggtggataacacccagaccaccgagcagggccatgtgaatagccatgttgtgctcggtgacagtgtccatgggtgaggacagaaggggagccttcagggagatacgcttggtaacaggggtatccaatgagacatcggaagcggggaagcctatatgggttagaaaaaaaaagaattttctatcttgactgcggggtccagcttaccgatgtaaccaggcagaatcaggaaatcattgtaggtcaatgcgccgtgcttgtcagagtcaagcagggtatcggcatcaagaccatcgagggtggtgtaggtatccaagacctcaacggccttggtgtagtcggcgatctcagccttcatggcagcaccaggtgcagcgtcgccggcggtgataggcatgatgaaaagaaggtaggtttaaattgaagactgagacacgaccgagtgagatattaatcaacagaaagaaacgttctgttgatggagaaagtcgagctttcccaaggaagagaagaagaagaaaaagttcgagcgaaaaattgtttccttttctctcccgtgcacggccaagccaagaaaaggcttggctattttgggtatagcgtactggcttttttcactgttcgcgcttctgattggcttgtaaacgagatccttcaaggcggtaagctttttatgcttatcattatacatcgatgcaggtacatacatcggtactattatgtggtgccatgtaacgtcgttgggtatgattatgatgtacagtcctcttgtcaaggttatttttccgatgagcgggacatgaatatcgattgccatacaatatataagacagcttttgaaggtggaagtgaaggtccaatgtgagttggctataattatcagggtgccattcttgatatttacatatgtatataaaaccacataacggaccaagatccttgttttattgacatggttggccttgcaacggatcagtaatcccactagttacctaccggcttcaagtcccgtacagtatgacgacagaatgatagtagcaaatgcaagctattaaaggcagcatgatttgattcaaattgtcatcaaacatcaattctcacttctgacttttgctatcgatatggcttcatctcctatgggtgaacatggcaccttcaaacctgcaccgggaccacagtctcagaacaagccggggtaagtaatgtttcacccgagcgaaatatatccactaagatgatgtgctagattggagagcaaaatgataaatcccagtgagtcgaccaaactggaaggccttcacggcttctcggaatatatgggttccgggaaattgaagggcaaaaatgctcttatcactggcggggagtatgtgcagcaagttcgggaacaaacttatttaggctaatcaatccttagttctgggattggaagatcagttgctattctgatggctagagagggcgcggatatcactatcgtttatttgccctcagaacagcttgacgcagagacaaccagaaagtctattgagcaagagaagaggagttgccttctcatcccagccgatttgagagatcgcaaattgtgccagcacgcagtggatgaacatgtgaagaagtcagccagcataaggttttgttcctggtattagcaaatgactgaccctgggagtctacagatacggcacggtcaatatacttgtcaacaatgcgtcggcacagtacctatgtacggaatttgagaacacagatctggataagactgaagacatcttcaaaaccaatatcatccagatgattgcgatgacgaagtttagtcttcctcatatggcacgaggtgattcgtgggtgctttcttctctaatctatatcatcatatactcacgcacttgctgcaggatcatcaatacttcttctatcgtgacttttcgtggctcgaaaaccatgattgattatgccgcaaccaagggagctgttatcggttttactaggtctttagcacaatccttgattccaaagggtattcgggtcaatgcagtcgcgtgaggatcatccataaattcctctttgaaatcacacactgaagcattccaaattacagtccaggtgcaatttatacaccaattcaagttgacactcgagatgcccaacagatggaaggatggggtggcggggctagcattggacgaccaggtgagcctagtgaggttgcaacaagcttcgtcttcttggccagtgcggacgcctctctatactgtgagtgatcaatatctcacaccttcaaatattcattattcttgttattgtggctaatatggggtaactatacatgtatagatgggcaagtgatgcattgttacccgcttggtgactaaatagtgtagggggtggtggaaatgttggagcactgtgctgagcatgtatttgccattggtatcaaatttgaattcaacgtgatatgaagtcagtacaggagccacggcttccctgcagtgagagccttgtcccatccctcatcattctgccagatagcgacgctctcgatctcccctctgcccagttttagtccattgtagagatgctaggctttatttcagcgaatgttaatttcagaccgacatatgcagcttactgggaaaagtccttcaccgggtcgaggggcagacactttcccgtctggggactcccagcggatatcttggaccacgcgatgatactcgatccgcaataaatagacaagtggttcctctgtgaaaaatgctttcaatgtgtttcccacctgatgcgccgttgagaggtggatgaaaccatcggcctcgtccagttcgctaaccgtgagccgctcagggattggttcgcgaactggtgcggtggaaggcacaatcttgtagatgtagcgaggttgagaaatcaacgaagccatgatgagatttatggagggaagcaagttaatgcaccgcgtctgtggtgatgatgagaagaaatcaaagttagtcaggtggtttcatttgttggcggggtcggttcaaccggcaacttgcctttcaaacgcgctgggattattgcgccattatttgtacttgtttacttatctctacttgttcaacactaaaatgaatttataacatatggaattttcaatgagtagttatcttcaatgctgagtggatagaaaaagattcaatcaagacttgcggggatatatcctgtagcatatccttggagaggttacagtactaagcatgatatttgtgaacgagaaaagccccagaaagaggcaagtctctcccaaactcaaccaaagcttgaaggaacagcaagtacaaagtacataattatgtatgttgtatattaattgacggtctatatagttaacttactgggtgacttccaaggttgaaagctgtgttcgtcgcacgggactaccacttttgccaagactgcagacatcctgataagtcagatattgggatttgaaggaatgttcggcagatcgattgattttctgtaagggacctttgcgatttcgaataattgcaaaatagaagtaagcaacagatctatgtccacctgggcacatgtgggactcgtcacaatctcttagttctgcatttcacgtgattcaagatcgacaagccacaatcacctgattgcgccatacccgatctggagatttgttgtgccccctgcgcccactttggggaatcttggtcgcacttgcacccccaccgtcaacaattccatcatcggggattcacgagtctagagcccattgacacaagtcgcgcatctattgattggattttcttcgcgtataagccatgggaggttgcccttgaacgctacccaatccagaacgtcttttccagaagaagtcttggagacctttaactcgcgcattccgcatttaccaccagagcagggatgcggtcaaaggagcgcgacatttttcaaaccatttttgcataccgtcctgagattaaatgatgtcgaatcaatttccatccctcaagcgggcccagacggaccttccctcacagtccaccagtccgttacgaaacgggtcgacagcgtccaccaactcgtctgcatattctgtcgcatcaagctcgtttattcctagccggactagcactgtctcctctaatgggtcggtatcaaacaaattgggtcactttcgagggaagagtgaggcaggcagtatgagctcagcaacgactgttacggacgcaatggaacgaggaagttggtccaatgcaggtacgacgtacgacaatattcgccgatctctacgaccactacaacaagtccctaatactccatcctcaactgcaaatactggcgggtaccgacattcacgaagccacacaattgatgaatcactcccgcggaaggactatcgaccaagtaccccagaatcgcgtcatcttaatctcaaagagaatcaggctccgcgtcaccaaacacacagtcacgaatctcagagccctccagcgcatatctctcctcgtcactggtctactgtgcccgaaacctcgcatccttcgtctccccaaaagacagtctctcatcccccacagctgactgctgcactgtccgcacccgagcttgaaaccctgcagaaatcatccaccggccatctcagaactctctcgaggtttgcaaagtccggtgaaaacgaatttagcgcagctgcagcctccgtagtaggcttgcaaggccgacgacgcctcaagcgagcggactcggtagtagggagaaatggcgcagtatctcccgaaaagccgaaggcgtcctcgtgggcggccgggaattggatggaccaacagcgacaattcatccaagcatacgagtatttgtgccatatcggagaagccaaacagtggatcgaagatgtcattcaaaagcaaatcccgccaatcgtccagctggaggaagggctgcgagacggcgtcactttggcggaggtggtacaagcaatgtatgccggcaaagcacttcgcattttccgacaccccaagttacaatatcgccattcagacaacatagccttgtttttccggttcctcgatgaggttcaattgccagagttatttcgatttgaactcatcgacttgtacgaaaagaaaaacattcccaaggtcatacactgcatccacgcgttgtcatggttgctcttcaaaaatggcatgctggacttccgaatgggtaacttggttggtcagcttgagtttgaacaccacgaactcgagaaaacccaaaaaggactggacaaggctggcgtgagcatgcccagctttgcaggtatggctgagaactttggcgcggagcctgaaccggaacccgttgaatcagaggaggatcgtattgatcgagagatacacgaaaatgaagcctcgatctgcgatttccaggctcaggttagaggagctatgatacgtttacagctcggcaacacgatgaacgatctgtgggactttgagccccttctcattgagctacagtcacgtctgcgtggagattgggcacgccaaattagtgaataccggctcagcatgctccagtttgcagtggggctgcaggctattagccgaggcttcattgtacgtcgcagtcagcaaggcgacgagcaatggcgaaaagcccaggaaacagatgttctgcacttccagagcttgattcggggatctagggctcgcgcccagactagtcacctacaaactcgcgcacgacaagaagagtttggcatcaagcagatacaggccgcgataagaggtacattgcaacgcatgaatcttggggaccaatacgaacagtctcgatatgctgaaaatgatgtgaaagcacttcaagctttgatccgcggtaccttacaacgaaaggagatcaatgctcgttcccaagagctaaaacaagctggcagttccgtcaagtcagttcaagcagctatccgtggtgccttacaacgaagagaaataaatgccttgtccgaagaggcgaagcaagttggaaagtccatcaagccgcttcaagctgctatccgtggtacgttgcaacgacggcagatgaataccctgtccaaagagacgaagcaggttggcggctcgatcgagtcgcttcaagctgccattcgtggcacgttgcaacgacaacagatgaatgccttgtcccaagaggtgaagcaagtcggcagttctatcaagtcgcttcaagctgccatccgtggtacattgcaacgaagacagatgaacgctcactcccatgaggtaaaactgacagaagcacccgtcaaatcgcttcaggctgtcattcgaggatcgatcacccgcaacaacttgtctcagatgaaggttctgctcaacaacgaaacgccccaaattgtctgcattcaatcaactctcagggctctgattgccagacaagcacaaactctgctgcttcaggcactagaggaaaccgaaaatgagtgtactgcactgcaagctatcgtgcgggccgctgtcgtgaggaaaaacacctcagctattcgcaacgagcttgcggaacatctattgccagtggtcgacctgcaagctattctcaggggacaagctctgagagaattattggatacccagaggaccgaattgctcgaagaagaaccttctatcttggaactacagtcccgatgccgtggcgtcattcacagacagtatctactcgcacagcggcatgaactgggccaggaggaacatgctattgttgaacttcaagcccttgcgcgtgctgctgtctcacgaatggaggttggtgacatattgtctcaccttgaggacaacgaggaagaagttgttcaactccaatctttaactcgggcaatgcttgcgcgggttgaagttggggagatcttgaccgatcttgaggcagaggaggacttcgtcacggacttccaagcacggatcagaggtcacattatctgcaaccgctttgaggaaagacgtcaacattacaatgaaaacatggagaaggtcatcaaggcccaaagtgttatccgagcccgcattcaagggcaggcttataaaagcctgacaagcggaaagaatccacctgttggaacggtcaagggcttcgtgcatcttctcaacgacagcgatttcgactttgacgaagagatagagttcgagcgcctgcgaaaggtggttgttcaacaagtgcgacagaacgagcttgctgaacaatacatcagtcaactcgatatcaagattgccctccttgtcaagaataagatcactctggatgaagtcgtcaagcaccaaaagcacttcggtggccacattggcaacttgctatccaacaccgaaatttcttccaaggacccctacgatctcaaggcccttaacaagacctcaaggaggaagttggaccagtatcaggtgtttttcttccttctccaaacccaatcgcagtacctggctcgcttgttccggcgattgcgtgaggtcaacacctcggacaaggaatatgagcggatccggcatttgatgatgggtctctttggatactcccagaaacggcgtgaggaatattatctcattaaactcttggcacgatccgccaaggaggacattgaaagcttcacatctcttgctgaatatttgcgctgcacctctttctggaacaagcttttcgcttcatatgccaagtcatcccgcgatcggaagttcatgcgcgacgtcttggggggtgtcgtgaaggagtctgttatcgacaacccagaccttgatttggagagtgatccaattcaaatctaccgttccgcaatcaacaacgaggagctgcaaaccggccaacgaagccgccgacacccggatcttcccagagaagaagcgattagagaccccgaaaccagagaaacgttcattcaacatttgcaagatcttcgtgacattgtcgatcaattattctcaggctttgaagacttcctataccgtatgccattcggtatcagatatcttgcacagcagatgtatcagaatctactagagagattctctgccgaggatccaggcttaattctccaggcggttggccactgggtatggaaaagctacttccagcctgctgtgctggagccagagaagtacggtgtgatcgatcggggcctcacccaagaacaaaagcgaaatcttggcgaaatctctaaggtcgttgctcagattgcatccggcagactatttggggcagataatgtttatcttcagccgctcaacaagtacatcggagagtcaatccagcgcctagggaatatctggggtcagatgatctcagtccaggatgcagagtcttatttcgacattgatgaattcaacgacctctatgctaaggccaaacccaccctgtacattaagatgtctgacatcttctcgattcaccagcttgtggcctctgagattaactatatgtgcccccaccctgatgacttcctcaaggaagttgtgcgagaacttggcaatgtcaagagtaacgagaacgaattgatgggcgtcagctctaccgagatcaatctcacattaaatcccaagttggcccagcttgaaggtaagcaattcagcaaagcccccgtttgttcatttttctaactctacatcccagaccccgaagccgatgtgaagacgctctttatggagactaagcgttgcatcctttacatcatccgagtccaaacaggttccaaccttatggatgttatgctcaagccgccgacagccgaagacgatgagcgatggcacactttggttcgggaagaactgagcacgaacaaccctcgccgaggcgcttactcggaagccaacagcttaattgacattggtaccatgagctattccgagctcaagggcattgcactcgaaaatattcttcgtcttgaacagactggcaagatcaatcgtcacaatcattatcaggatttgttgaatgcaattgccactgatatccgcaccaagcaccgtcggagaattcaacgagagcgtgaactcgagggtgctcggctgacctcccagaggctcagcggccaagccgtctacctggaccagcaactcaagacatacaacgactacattgagcaagccatgatcacgttacagaacaagaagggaaagaagcgattcctgatgccgttcaccaaacaatgggatcatcaacgagagctgcaaaaatccggcaagatattcaaatttggatcctacaaatactctgcgcgcaccctggcggaccgaggtgttctggtcgcctggaagggctacgccgagcggcagtgggatcgggtcgacttgaccatttcaagtaacgaagttggtgtgttcaccattgacgggagcagcggtgtcatgatgattcctggcgccaacgcacaggtaccgctggacgacttgctgcaggctcagttcaacaacacgcaattcatggacttttttgagggacagatgcgagtcaatgtcaaccttttcttgcatttgatcatgaagaagttctataacgagtgagaggcatggcttacggacttgatgagggatgaattgggtgcacattcttattgatattattatttgtctgttttttttcttctttcttattattgtctttgtttaagataccatgggtattttgttgatttcgatagcgatagcattcggtctatacgggcgaataacatgtacacagtatgataccattcagtatcaattgtaaaccaattcaattttccagaagacctcttaagtagaaagtagacttacgtagaataatcgtctgttgtattcgaagtatacagggcttggtcaggggttgccacgtgacgtggcgcattcaatcgggttgccagctggaaaccgggcatcttcctcccctccgactgtccacgttagtcctgagggatttttgattcttcctgtgcttggcttccaattgcctgtgctgctattatattttctctccgatcctcgtttctccatacttcccctgacgactaacagtcacccctcaccatggatttctccaacctcaaagatcaagtcagcaacttgtccttgtatgacctcaaggccggtgttcgcaaggtacagaatggtaagtctgaatcccgattggtccgagggcgttatgaacaagcccgaatcagcttgcatgtgtcttacaatttgcggaaactgatttggccgttccgtcatagctgttatgaactataccgagatggaatccaaggttcgtgtacaatcgctcacccctgcgcgaaacaacatggcctttcgcagggtgaaagcgaaaagatggtgcgatccaatgcttaccctagtcaggtccgggaagctacaaacaatgaaccctggggagcctcgaccacgttgatgcaggatatcgcgaatggaacgcatagctagtcagtccatgttatctgtcattacccgcaataatgcgcaagcgctgaccttctgttattacagccaattactcaatgagatcatgccccttatctacaagcgattcaccgacaaggctgcggaggaatggcgacaaatttacaaggtaagagaaccgtggttattcatgcgggtgtgcattgactaaaccttttttcctccgaatatagagtcttcagctcctcgaattccttgtcaagaacggttccgaacgagtcgtcgatgatgcacgatcccacatgtcgttgattcggatgctccggcagtttcactatatcgacataaacggcaaggatcagggtatcaatgtgcgcaaccggtcgtccgagctggtgaaattgctgggtgatgtggatcagattcggactgaaagaaagaaggccaagaacaaccgcaacaagttcagtggtttcgaaggtggcatgggtgccggggcgggcatgtccagctcaggttcgggccgttatggaggctttggcagcgatagtatggggtacggtggatacagtggaggtgtctacggtgacggcggcggctttggcggagaatctggcgggcaagctggcgttgacttccaggacaatggacgccggtccaaccgcttcgacgaatatgacgagtatgacgagggagatgccccagcgcgcccacgtgagtctatctcccgggcgaagccccaagcaaagaagcccgagccagctcctgcgcctgtagcagacctcttcgactttggcgacgacgagcctgttactaccacagcttccacctcgactggcaagcaacccgctggcagtgctctgaatatactagacccatccccagttgacgacgacgacttcgacgacttccagtctgcaactccggttatccagtcatcaagtcagtttgccattcctcctccagcttccactgccagcacaacttcaaacacccaattcgttgcgcctcagccaatttcggcctcacagggtgccaacatcaacggcctagttggattcacatcggccagccccgctccctcttccagcggattcgccactcccgtttcgcagatggccccgattcaacagcagaagccctccgggtaccaagctcccacacccaactacttcacctccgtcaacgtggcccaatcttctggatcctctcacggtgccacctcctccatgtcctcagtggcttcacccacagcgaataagccagcttcagcagctgccaagaagccctcgggtgatgttttcggttcattgtggtcgaccgccagcgccagcgctggcatccagaaaaccaacaccggcacaaacaagggccctaaccttgccagcatggccaaggaaaaggccagcgccggcatctggggcaccccagcaccctctagcacggcctccacgcccagccagccccagcacaagcaacagtctagctcggcctttgatgatctgcttggttgatcagctagcaaagcaactcgtcgctcttacccactgagcccatgctcgcttcttaattttgcgatatggagtcatgatttcagcattcatattcctgatttgatttgatctttgttttattctgccttccttcattgtttttgtatactctattccattcccatttcttctctcccctagttggttccctacttccctacctagctagctatacgtacttgatttcctctgcggggtggggatattctatcttagctgccgccgctcttatgagggcgctcagagtcaggctcatcgagtaaatttgtgtccggaagtcacgtgattattcagtgagatctgataaacgctcactaatcgcttcttagagtcatctatgaagcacctactttctgatggcccttaatcttcactatgctcctcttatttcttggggtgtatgatcttcttattccgctctcaaaaacagcgcaagcatgatgacgcaagactggaaggcacaggggtttctccattccctatcgcaacttcatacatcatgggcttcgtcctcggtgaaaccgcatgcattgcggtatgttccagatcacccgacagctaataatacatgaatgaaactcataaggggtgtgtaaaaggtagacaaaatagcaaagctagcggcaagtctcaccgaagatgctatggcatccgacgataatagctcagaactccacattcacaccaatccccatccctcagccaccagatcatcaaggacagcactataagcaaagaccccatcactcagatggaaaaagccggacaccccacctgattcaacgtcaacgattggggcgccgcacacaccatcagagatagccctattaacattcccaaaaaagaaatccaccgatctggtatcccattcttcaaatttgattccgcgatgaccagctggacgtttcggttgcatggtttgggtgccaatattcatcatgctaaagagccctgaactcatgccgtccacttcactccatgagccttgggagatttgggacatttctaggaggcgagtaggtggttcggcttgaaagtagcaggaattagtgaagctagatgaggcagcgggtgttagtttgacgagagcgatgtcaagcccaggtcggatatcgacgacctcgccgataagatctcctccattcacaatgggtggtatacttcctctgatgagagaaaaccatgattggtgactgtcagcatttcttcgcccgcgagattgcgaattttgataccacacgtggttgcagcgtttgtggattcggttgaagtacctgatagcccaaaaccactctcgattctacatcctggtgtaagaaccaaccgcctaaggtagtttgagtcatcttgtggtgcagcaccagcagccgataccagagatgggacaataaagggagggcgggtaaggcttctcatggtgctagaaaacggttgatctccgtggtggtagagtgctgttcggcctgccacgacccgggaagggatcgcttttcgtagttccggccatctccaaactcaagttcgaagatagtccaagccgggagaaacatagcagctctcacacgagcaagtggcgcgatggcagtaagcacagcaactgcctgacgcttagtcggattggttaattggggccaccggacagtgggacagggatcgggaacacgaggattcgaatatccagataaggggattggctccctaaacatctcaccgggacgcacgaatatgacaggcatcgttccaagggtcagtggtataggctggggtggagaggccgtctccatacaaataagccacgcggagatgtgcactgttccttccccgaacttattacggatccaggtccagtcctgacctgaggggtggcggaacttgtggttttgctcgtcccaaagcgtgaacggcgccatgtcattcaagtgacgtgcaccccagccgccgggattttcccagcgtttctgttctgggtgggaatgggggagcagatcccgaagcggactaacaggcgcattatcatatatgttggtgtagggtgagctttgctgaatacactgaacatgtggggataggcggatcggagatgccatcggagttgccattacatatgctgactgctgatggtacaagctatgggatggggtaagattatgtactattccattaccggactgaacgagggacttggtcacatgaccaaaccacctgacataggcaggagcataattacttgaccatagcagagtaggttgcgaaaatttggcctctcatcccacctcacgtaaaaatattcgtcccccgcgatctcttatatacgcgcggcaatacctcgtttctgcgcattttttgtttactagtcgcgctgaaaagcaaacagtctcatatttcactgaagagtggtactactttatgtacggcggtattcggaactttaatgtccgatccatttggcccgcgattatattagaaatattatactggagctcacctatatacctatcccttattcacccaatggattttgcgaggcaaaagctgggttgtggtgatgagcccgataccttatacgataggcgtgaatgccagggtgaatgccaggtatcagttttgtatatctctaggcaggttttgtctcatagtaaattagttatatagtacattggcatttgataaagtcgtgtgtagacatatgctaaatagaatgtatcttataataagtggcaattgaatagatttgaatcggcatgatgccgatgctcattgatgctggtataacgcgtgcgctgaaggaaactaaatacaggtgagggaaaacgatgggggataataagagacatttgtgagacggaagaaagaacagataaggcgacaatatggcgaaaaacttggggtatgtagtagaagaaagattcttgatcctcctcaatcccaggttatgctcccccgaagtgtatgattagaagacatgaattgagatcgtgagaaagggatgatatacgttaataaagaggaacttgcgatgggtgatagttcatcgcagtaatgggttgaacataaggctggaaagaaagaggtgggtttatatcagactaaacagtccgaagagaaggtaaaagagaaaaatccttttgagatggagctctgaaaggtcttagagattgggtaattcgggtttggcggatgatccaccaaggaggtgctgattgagtgctcatgaaacaaccttcccacatagtcaactgcatgtttcataccagagatcttcccaccctgacaggaaagtggaggttgccaagctttgctgatcgactgtcaggatttcatggcgggttgcaaccgaaacagataagccatctctccaggtgaatcgtgcacggagcaccgccaaggcttttcatggacgaacaaagccatccagggctgatattcaattgtatcaagtcttgctcagcgtgctagagcgtttgtcggcgcccccagccgctttaccggtcggagtcccagtattcgtcgcagattgagacgcatctgcgccttccgtcgaaactgcagcgagggaactatcatcagtggttttgtttccagactgagcgctcacagcaaatgaagcctgctccacctgggtaggagtagatatttgttcagactcggtggagtctagactaacgtctgcggccccggtgacgtcggggtttggttccccattcagcgacgtcaagcctccttcgatgtctcgcaaaagacgcacaaattcctccgggacaaggccattctcccctgtcttgggatcttctgcaaccagccagccctggccatgccggtacgaaacataaatcacctggccctcggtaagaggaagttcgttttcatgctctcgtgtgaagtcaaagagtgcgacggcttttccatgcatctcttcatccgggcagccaacggcaaactgataatctctagagtaccgattatcaccggggttttcatcttcggactcaaacccagggtcatgttcatagccctgctggccggccggggcgctatatcccatggttgaatagcggccttcatttgccggatatgtcacatactcaccacctggtccatcatctgacgtatctccatcatttacataataagtctcactgccatcggggttaatgccaacgagcattccgcgatcactgttcaccgcctggccagttccagacatgactctctcatctacaagaccatttatgtcagaagtcttcttgcgatgacgcgacgtcacaactgggctatgcaggtcttcatcctcgctgtatggtggtccatccccaaaggacatggctggcaactgttggtggacataggtaatctgaggttctatgcccgattggcctgttgaccatccgcgcgatatatcccaagaaggtgatggatcggagaggcgtcggtgttcacttgccggtgtggagaccccggaggcgcgaggaggaggaggcccgtaatgcaggggatgggtcgacgggtaggcgaagtctcgcacaagagcatatggaagacttgtatggaaaatggggaagacatgggagcctgggcgcgaacgattttgtgatgcaaatgagacattggaatacgtggagagccgatccttcggatgcgtcgatgaccgtttcaccgtcccatcggtgaggatgggtggcaggactgagaggttgtttgtggaaataatgttctgcgatgatgtgggagaagacatcatggttgacatggagaaagacccaggattgagttcgggatgatgaataacggggcggatcttagagaaggaaatgtggggttgttcatcggtcgcgtagttggcgctctagtttcgcattgcgattgatatggtccaggttattgaatttgcagtcgcagtcgcagacagctggttttcctttggttcaaacaagggaggtatatcttgtgatcggagatagaggagatattcggctcgaggacgatgtagtaagcgcccaagtcgtaaggggtcaaacccgattttaggttcgcgtaattcaaaccaggggcaacccttggatgtcaagcttttgaagcaaaaaaaaaggatattatccccaaggggctccggtgtggtggacggtgaatgggtgggtaatcggcaaacgacacgagggaggggggcaaatgtggtccgagtggaacgccgaaccgcgacggggaagatctcacgatgagaagacgatatcaacaagagaaagccggcgattttgcaagatttgcgtagtagaatatccgttcaagggctcaaggtgggattggcaaaatcgagactgttgttccagcggtttgtcccgcaatcttgagggtagggaattgctaaatatagtagcagaaaactgcagaaaggaccaatgtcagatacgaatgtaacggaggcacagcgcttatgcaggaaagaatgtgcaaaccacacggtaacaagtgttttggtcaaggccacatgggaaatgggaaatgggaaattagagggagaaatagactcgcgagtgaacgctcggagattgccatacctgtctaagttgtaggttgaactggagtaatgatcagcgcgtagttgattttgggatcgggggactgttggttgttgggacaatatgatttatccgatggactgcagcaaaggaagcagcgtgaatcagccaatatgcaaggcagccgcttgagagtcacagagttgggcgtgtgtgaatgggtgaagcttgaacccgtcgagcagtcacgtgccgcccagccttagcgcgtttcaagtctggtttcgtctattcccgtttgggactaaaggctatatataagattgttctacttcgatgcctccatgttctgttatgaatgcagggtatctgagacatagattcggtttacaacgggataattagtttacaaacaaagggattgtcatttcattcggatattcagtcgctttgttctatcttggatgtttggtctttcaacttcattttatgtgggttgactcccagccataaatacagtgcttgtgctgatctcccaatctgtcactgtgactgttttaggctgaacccctgtcgcatccaaagatgtgccaaaggtggtcggctgagaggatagctgagaggacggaacgccgagtgcatcgaactgcgaaggaatcgcagcattgttgagatcttggtcagtctcatagtcactcttgactgcctgcttgctgattgtggtcaccagatccacgtccatacaagttgtgtagatctcggcctttccattgggatacgtgggatcaacacctgcagcggtgggccaattccacacccaatagagtgtgtatggtttcccactgggagcattggagggcagtcgaatatcctgctgacaccagaggtctgctcccatcagtgggtctgctgtatgagtatacgtcgcttgtcgagtctctgagatttgccccgaattgacctggtagcaacggccatcgtcgtagttctgcaccgacagaagcactccccgtccatcacctcctgttccatctttggtccaggctccataaacatcaaggaacttctcgcctgtcttgggctgtgtggtgccatatacataaacggatccccggctcgcaggctttccgggctggttctgaggaagtgtcacatggccgttttcttggtagcgaagggcaattgccgcgccagcgctggcttcaagccgagggcttccctctgactgagtctgatcctgctgagtgtccttgcacatcttgtcggttggcagaatctgagttacatttgcccttgtgttgggtgggatcaagtaggtcattgcagtgtcgctaaagcccgatgtcgtgcgcaggtagtttcctcggggatatcctggagtaccgacgaaggttccattcggagcaatgagagtgagctcttccacccaagaatgagcgtgtgttggggtatacagagcaaagagcactatcaaaacaatgatcaacatcgtgatagtagttttggatatgtaggattcgaggttaaagtttgtaagaatgaagttttgtggacttgaaggggacgagataacggcgaccggcggcgtcaaatcgagtaggtattgcagtatctctttctttgggtataaagatttggaagaagctgggagtgtgcaagcgggaagtgccgtatttattgagtctagaagaacgatgaagcggccaggtcgaaggctacaacaatgggctttgtcgagatgaataggatcattggaatgatagacctgtgactatgagtgtgaatagacaatggctctattcttaattttacaccaaacacccccaggccgcagcgaaaataaggataagaatagtataaaaaggtttcaagggaagctgttacacataaagaaacccttgtccgacttcgagtctttgagtctaattggagaggctctataccctgtgccaacccgtcattgttacaatcaaggctgttaatagacaatacaaacccaatgcccccagggcctctagacaaagcaggggatgattgggtgagagagaagatatttagagtcgcagaatatttcgagacatgttcggttccgctcctggcgcgtagccgtgatatatgcaagactctaggtgctcgatcttccaagcttgcaagtgtgttacaggtctgcaggtccgttggcccagcaagcacggccattggctgattcgggccaccctgggcgcttcgccgtcagagtcgaaattaacgaagaccctctttagcgctttggctctttctggatattattctgtttgctttttgccatttcatatgaccacttgctatgatacctctggctctgaacgacttgtagatttatcaaagtatcacaaaatatatcagacattcaccaacatctcattaattaaaagggggcacggtgtgccaacagtatcttacttttttggagcctatctttttgagaagtctcagcttgttgaaaaaaggctgctatgtcgatgattttgcggagcgaagcgaagcaattaaaaaaaataaccctctccccttcccagggggggtcgaatggcccccggagggaacgcctcgaaaggagatcatgtgaccaggcgctctctctactgggtcgaaaaaaatagaaatccagtcggtgaaaaagtaatcgctgagaaacggcagaatagatccagccggcagaaaaaaaaaaagcaatcatctagtactctgtactctaaccctatccccttaacataagatcctaagatccttaagcagctcaaagatattaaatcaaaggagcatattattagagggggcgactcactctcctatttctgtctagttattaggtggtcaattactacgtccacgggtagccactcatataaaaggtacatataccccatattatgtactcaaccctttggctagttaaaggagaaataagagtatgaatcaagaataaatttatagttgaattgattggctaataaaaaaaatctcggatatcttatatatagaagtgacaaaatctctattatgtatattttatatttatgtaccttttgtgtgggtataccatataaaagatacctaaaatcccaaaacttccgttatgtggcaatcttctgttatgtgggacagacccatacctggaacaggtatgggggcggtaagacggctattcttatagtcagatcgggaaggcactacatacggggtattgtttgctatatattgctatataaatagatcctccccccaccgctgtctctctccccatccacttcaccattacctttggaatgctacccagtctttctccctgatcgaggccatccttgtgtagccatctctggaaaatgtctctggaaaatggcaaatccaatctcattctcagaactcctatgagaaatgcctcctccaatcaatgacgggtcctcacacatggcaaacagtgccatccctaggattgaatatgttggttcccttcgcccctagccaccttggtcaactacgaatactactgacatcatataggcgctttcatatatcccaagatcgatatcagctcttcatgactgttgccaagtatgacgagaaccatctcaagcacccgagcgataaggagcataacatgcaacccatcataactgtctcttcagggttgcagcccacctcaatgacattcgagcacatgatagctgttgatgagcagcccaagaatgtgttggtgaggttttgagtgccgtgttcaacacgaaacagttggatttaggtttcgcagattctaaatgcagagttaggctgccggagctaccattatctggaatcatgatacatccaagcttatcgggtagtcgaccagagctatccggaggatcataaaaaataagaggaacttcctatcgaggtggtgagagcaaaacggtcttaccgttcttgccggatcattttcctccccattatgggtcttcagtggtccctacaaatcctgcaaacccttgaccaactcacttagtaaaagcgataaattacaacatgatatttcaacaacggttgtctatatgagcttttccttctagtctaatgctttttatctgatatctagctacttactggagtttaaagggatttaataaattagtgactgagatatatatatttctagggttcagcgacgtatttttcgataccataataatgcaagttctcgatttattcaaaactgatatatgatactacaaatgcttatcaattgctatcggcgagtaataaaattaaaaaagagcgttggttgttgaaatatcatgttgtaatttgtcgcttttactatgtgttctgggctgcgcagctcgcccgggtgcgcagctcgaccgggaattacgttaggcctagtattcccttgcctgaacgactctattattttgctgttcgctcagcaaaataacctaggctaccccctacagtaggtcacattaggacagactttggttcgtcaacgctcagcaaactataacccgtatgcgtcaccaccccgagtggtcgcttataggtagctggtaatgtctgtttcatttgttcttgtccccctttatcatgaccaccccttatggcagttggttgttcccaaatctatgagcacatgattgtcgcaggctgaccctgacattgtaatctactaatacgattgcgaacacgctgatcaaaatacaggacaatcccaactacaggcttacataatgaatggggagtgcccagatgccccccaggcccaggtttcaggaggtgccacccggcgacccctggcttagggcccagtccatggggttcacttggtgatcaaaaaagcagcaaaaggggagtaccaacaagcatcagagagcaccaataccataggaaagccacttgaggccacccaaggcacccaaggcacctcagaaagtgagaagttctgcacattcccaagaccggagtaactcggcatttaccaagtcaacgatctaatctttttctctttttcacttggcaagctcggttaccgagtttattatggatatatggagtctgcaccgggtcaatccgagaagatgatttgactccgagttatcagatttttatcagatttttatcagatttctccgtagctccaccgggtggattccatctcactggtatgagagaaattgggtggactctttttctgacatggactcgcagattggatgcccagtcctccgtatatccctcgacttccctcttcagactaagggaaatgtggctgacgtggacggaacaaaacctcatttgaataatacagggctaataaccctgaacaaaacgagtggagcctttgttgcttctctcccacattctgttttgtatcacgtaaagatgtcaagatttgagcaatatagattgaatgtcttcctaaagattcctaattcaattcactatgtatagtgtgcaacatggtatgctgtgtcccatgtcccatgactatagttaaaggatcggcgtaaatataaacaaatgcctgtgcattcaatagctccaattccttgggttgtactttgtactttgtctgttgtaggcactcggtacctacctacttgggcttttgttcggtgggaattttctctaaagggtctactgcatcacccgcggacttgaattgccatttacaaatactatgttattcctccatatcaccctcttcaagccattccgctatatgtagttctttatgaaatattgcagcctggatcgtaatcgtggaatttcccctccatgtcagcttgactcgaggatccggcatattattgttctgcccattcttccaaggttcctaacgcttctattatttattatttattctttgttctcgttataaaataccaagattctccaataataaatcgcctcgctggaaacccgaccaattctccactagctgaagtcttggcgaccccgttgtcggcgatacttaattccagcggtctcgggcacctattatttcagcttcagggggcccttgcttttttttccctttacgacctccgattccaagggctgtgccttgagctttctttacttctcccctcggtacgtattatttttttggtttggaccttggtttctgcaactaagagaagaaaaaaacagtagcccggaatcctgtccagtcaacatcgacttgtgcagcccatatgcgctcctagaattagatcttaattcaaagattttctcctcaggattggttttggtgtaaaacatcatcccacgacggctttcctcgcaggttctggtccttgcggaccgtcttaaacacaacgccttcaacagacgtcctcaccgcttcctccgcgactagtcaacatggctacctcgttcatcaccaaacgccttcgctcaaacgaggaagagcagaatactcaacccagctggatccggcgtcaagttgtgtcaggcctccagtttatttctcaccgggcctgtgtgcaccctattcacactcttgtggtgatcgccatccttgccagcactacctatgtgggtctgctcgaaggcagcctgcttgataccccgaaagactcgttaagtgtcgcgggacaggtcgacaccgatgcccttctccagggaagtcgaaatctgcgactcggagaatcaacttcctggaagtggcaggcggaagatgcgtggactgacccccaggtgagcccatttcaccccaccgttcttcttgggcgtcgagaatgatatactgactcaatgaaatgttagaataagaagcctgctgcccagcacctggctctgacgaccctcatcttccctgattccaccaactctgattcaactgccccggcagctgatgatgtcccgattcctgccgatatctccgccaactcggtaccgtacaccccgaacctcttctcgcattttactcatgacgcttccctggtttacaccgtgccctttgaacaagtctccgaacttttgagagctgtgcaggagatccctgccccacccacggatgggaatgaggtggaatccaagaaatggatcatgagagctgctcgtggcccggtccacggatcccgcagagctgtaaagctctggatcgcggattcatggaattcctttgtggatctgatcaagcacgcggaaaccattgacattgttatcatggctcttggctacctctcgatgcacctgagtttcgtctcactcttcttctccatgcgacgattgggctccaacttttggcttggggctaccgtgctcctctctggcacctttgcattcctttttggactacacgtgaccactaggctgggcgtgcctatcaacctcctcttgctgtctgaaggtcttccattcttggttgtcaccattggatttgagaagccgattatgttcactcgggccgtcctgaaagcttccgtggacaatcgccgacctcttcccggcgctgcccctcgcccgctggcatcgagcacaccgaggtccatccaggactctatcgcagctgcgattaaggaccaaggttacgagatcgttcagcactactgcattgagattggtctattggctttgggtgcggcatctggcgtccagggtggactccagcagttctgcttcctcgcagctttgatcttgttctttgactgcgtgcttctcttcaccttctataccaccattctctgcatcaagctcgagatcactcggataaagcgtcacgtggcacttcgcaaggccttagaagaagatggcattacccacaccgttgccgagaatgtcgcttctagcaacgactggcctaacgccagatctggcgaggcggacaccagcatctttggccgcaagatcaagtcgagcaatgtgcgccggttcaagattatcatggttggtggtttgattttgatcaatgtcgtgaacatgtcagccattcctttccggaacaccggcaacggtggcctgctctcgcgtttctccaacgtcctgtctcctacccccatcgatcctttcaaagtggcagagaatggcctggatagtgtgtacgtggctgccaagagccagaagcaggagactattgttaccatcctttcgccgatcaagtacaagttggagtacccctcagttcactacgcagctcttaccgactctggttcgtttgacatcgagtacactgatcagttcttggatgccgtgggtggcaaggttctcgaaagtctgctcaagagcgtcgaagaccctgtcatcagcaaatggatcatcgccgctttgactctcagcatcatccttaacggatatcttttcaatgctgcccgttggagtatcaaggaccctgagacccttcccgagcctgtgatcgcaccgaaggtctaccccaagtttgaaccaaatgaacaacagtcaagaaggagcgtcgaagaatgcgagtctctgctcagggcaaagcgtgcgcccttgcttaccgatgaggagctgatcgatctttccctccgcggcaagcttccaggttacgcgctggaaaagtctatggaggatgagaacttgatgagtcgtgttgatgcctttactcgtgctgtgaagatccgcagatctgtggtctcccggactcctactacctctgctatcacttccgttttggaaaactccaagctcccctacctgaattacaactatggccttgtccacggtgcttgctgtgaaaacgttatcggatacttgccccttcctgttggtgtcgctggtcctctcaatatcgatggacaaaattactttatccccatggctactaccgaaggtgtcttggtggctagtacaagtcgtggctccaaggcaatcaacgccggtggtggtgcagtgactgtgctgaccggtgatggtatgactcgtggtccttgtgtaactttcccaaccttggcccgggctgccgctgctaaggtttggatcgattccgaggaaggccggagtatcatgacaacagctttcaactcgaccagtcgctttgcccgtctgcagagcatcaagactgcccttgccggaacctacctgtatatccgcttcaagactaccactggtgatgccatgggtatgaacatgatctctaaaggctgcgagaaggcactggacgttatgcataaggagtgtggtttcgatgacatgtccatcatttcgctttctggtaacttctgcacagataagaagtctgctgctatcaactggactgatggccgtggtaagtccgtcgtggcagaggctatcattcctggccatattgtcaagagtgtccttaagagcgacgtcgacgcactggttgagctgaacgtcagcaagaatttgatcggaagtgcgatggcgggcagcttgggtggcttcaacgctcatgcttctaacatcgtgtctgccattttcctggccactggtcaggatccggcccagaacgttgagagcagcagctgtatcacaaccatgaagaagtaagctttatcatccgccactttttgaccattgagatgctaataatgatttcctcaacagcaacaatggcaacctccagatcgctgtgtctatgccttccattgaggtaggcaccattggcggtggcactatccttgaagcgcaaggtgctatgctggatctcctgggtgtccgcggtgctcactcgacttaccccggcgaaaacgcacgccagttgtctcgtatcattgctgcctccgttctcgccggtgagctcagtctctgctctgcgctcgccgccggtcatctcgtcaaggcacacatggcccacaaccgtagcgcagctcccacacggtcctcaacccccgtgtcttctgccgttagcgccacccgtggcctttccatgacctccaaataaacgatgacatgactcactcctcctggcccgcagctgtaggccaatgtaaatgtgtggctacgacccatgattcttccgataccattcactttcaagactctttggcgtacctaccgctcgccttgtctttgcctctgcattataatgggagaccatctcaactgacagtaaaaaaaaaaaaaaattcaattactgacgctatccggtctccggacaggccggtattgaagaatcattcgatgccaggggatcagcaagatccaaatgaggcatactgaaggcatctcccttgggagcactataaccaatgcttcaaagcattcatgcgtgtattgaagctgttccacattgtgtacttagttgtttcggcatttttttttacattttacacttcccattcccatagatatgaccgaaagaatttatttgttttccaggcctagttctcaaataatacaaggtgggacccgtggactgtcggttacaacatacaacatacaaaattatacggtgtacaaaattatggggcaaggcaagggcctagaatcgtcaactcctgaattcttctcatttggatggttctattattaaatttgatatacggagtagaaggtaagtccatgtagatatgtcaaggtcaatgtctggatatgattttattgaacatgtttaaagttagctacattacttatagatatgtaattcctcgatacattctagtacatagatgtgtacgaagtagtaactatgtagtatgctgtgcccctggggagttcccctggcccgtggccttggcagggagaggtatagaatacaagtatcatatacgagtatagccacttttcgacttgactagtgatcttattattgatcaagctttaggaaaacgatgttcctggggttatgcagtcagccaagtaaaaggaatacataaaaaaaaggaaagaaaaataatgcgcatcagatctgagatcataccctcacgcataaatccctgtagatgcatacatatagtagcgctaatactgtacggccccggggagtaaggaactcgaagtaacagactggtattgccgtaagggaactgcggagagttcagttactaaaaccactttcgcactttcggtttgtcccttttccaccatatcagtccagtccttcactctttcggatctggtgctttcgctgttcgtattcttcgactatttacgactccctcgtggcgaatcacgactcctcacctacctccggttacattgtctcagattgggatcttagtggagaaatacaggggatttcgttttttttaccgtgacgaagtgaatgcctttatcgattatctgtgacagctggccccgtcggacagcgagtgtgaatattcaatagtgagaaatcagaacacccccagtttgagcctgatatgcatgggggttcgggagccatgtcgcctgtctctgttgatggtagcgaatggtcgggactaaatcagtatggaaagtcggacgggccattctcaccatcatcgcgagccaacctagccacacctccgacctccggcgtcccgagcgtaccgctaagtcccagtgggccacctccttcgatatcaccctccatccgaagcggtaacccatccccgcccagctcagtcgccgcaagatccagttccgggacactaggagacggcccgcgcgatggaagacgctatcgtcagatggaggagatcctgggccagcactacgtggtcctgaaaagattcctgaatggcacagcccgcgacgaccgtggcaagtcgaataaagcccgagataaactgctgcggctatcgccaacccagttccatgaactttccaccgatgtttacgacgaattgatccggcgacagcaggcctcgccgcctcctggacggccacctcgtacggacgtgcctccttatctccccgctcgaagcgacttccacgaaaagcgcaaccatgcccgccaaaagcttgctgcgctccaccacgtgcgcttccgagatttggcgaccgatgtcttctgtgagctggagcgccgcttcccgcatttcaccagccgagattaccgcgcccgaccgcctcccaatatgggccctggtagcgctcgcacctcgcaacagtctgctcggggtcctcccccgcatatgggccgcgggtacccgtctggtggtcccccaggcagtccgtttcctccgcgtgctggctctcttgggggcccaccgagtataaatggcgatggaccgtttcctcggtctttccagagcaatactatggtcccgaataagagcacgatggtcgaggatagcgatgatatggggccagatgatgaggatgatgctcggagtgatgcgttcgctctagatgctctgagccgacggggtactacaacgaccttgggtgagagtgagcggagattgttattagaaagccagacacaagtatcggttctccaagataagatcgaaaagttggaagaattagtccgcgccaaggatgaagagttggcccagtcatcacaagatgcagattcttccgggatcagtcataacgaacgccaggagtgggacgagttacgacatgatcttgagagtaaggtatcaaaagccgaggatctcaacagctcgcttcagctagagcttgagcgggttagaaccgagcacgagactgtggaacgagatcttcgcagtcagcttaatgactcttcccggggtgtcgatgatgcgggtctacaagcgcgctatgttgatctagagactcagcaccagaacttgcaggcagagttgcagcagcagaaacaggtgaccgacgaggtccgccgcgaggcagcggctttcctgacggaaatgaagactctttcagccgagagtcagtctaattgggagcgcgaagaacagctctcgcatgaggtgcacagactcgaggcagatgccaacgaatggaagcatcgttatgccaaggtcaaggcgcagctgcggcatcttcgcacgtcctctggtggtttcgccgactcgcggcccgacgcaagtcttgtcgccaaagagcatgagttggtgcaagccgacgggttggtcaaagatatccatgttactaagttccaggtatctgtggacgagctcctgcgagttgcgcgtttcgaggaatcgcatgtggtgctccaacacattaagatggtcattgtaacagttcgccatattctgcaggacgtggagtattcctcgatcccggtggatgggtcggctgctctgcgcgcaaaggtcaagggccaggtgtctacgacagcaaacaacatgatcaccgctacccgcaacttcgctagctctggtggtttatccccggtgtcgctccttgatgcagcggcctcacatctttgcaccgctattgttgacctgatacgggtggtgaagatccaggcatcgcctatagatgagctggaagatgaagattatgaggtggatgtacctcaagaccaattccccgactattttggtacatctggcagccaaaagcggatgagcaataactccgtctacagtgctattagtcgtccagatgactctcagtaccctgcgcagaatggcgcgactaatgacctcaatcatggctgggggcatgtgcaagaagatcatgaggtgttggaacttaaggtgggtcgaccggagaaagataataccgctcaacgaatgatttactgacggatgatcctagctctatgtcgaggaccagaccgatggcatggtccaacaaatccaggctttggtggccagtatccgagccgaggacaacctgcaaactgttcagacgcacgtatctgccatttcgaacgttgttgcgaatgtggtatccgctacagagcagttgatgcgcgaacgcagcggagacatcactttgcggcagacatctgaaccagtcatcgcggcattggaccagtgtcgcggccggttggcggccactgccggtgagggccaagacgccaccaccccggagcaattgcatgagctcacgaacaaactgcctcccattgcatttgagatcgctcggcagatcaaagacctcgttcagcggcttgaggctacatcggtggctactggcgaggaagatgacttccggtaaatgagcttaaccgaagtattgtttttcatcaggtgaactcggagctactcattttgtctttctttcccctcaaattcttctttatattccttcctctttgccccttgcttttcagcgactatttatctatggcaacgagcggacaatgtcgaaacgatgtcccgacatgtgtggcatttatgggctttcctgcccctttgtcatttctcctatattttcctattctttgtactttattttagcccttttgtattgatcatctaggtttttcggcctgatttcatgttgattcgtgcctctttattttatctcacgaccgcttgctggtgtcgggctatcatttctttgcatttggatgcatacaaaatgaaagtaccctgtacatcttcaacataatgactataccaataaatcaatgcaagtttccccctcgaaagatgcatgtcttcttgtagccaagattgctagttcggaagggatatcccggaagacattacataatctcggagctctagacgccttttggcgttgagcttcgtttttttccttctttctacttctttaattcgcattcctcatcatctatatcctttgtaagtgcgattggtcccttttcatctgaaggatagagaaaatatccactttgcttcagactctttcggagacatcattaggcaacagaggcagtgatgttttcccccttggaagtctggagaagctccaaagtggagcctcaggcagaaactgcacaagtggtctttaagtcaaccccagcaagctaaccccaaagtagcccggcacccgagttcacccgctccgccctgcccctcaccatgttctgccgactgaggtcaataaccccaccttcttccctcttctcttcttccctcttcaattgcacttctttccaccccgctgcccgatctttcgcttcatcaaccgccgctatgtccacccccaacactaccgctttcttcgaggtccagtacgcccctgctggctcctctacccgtaagttttcctgttattctcgtttccggcggggcagggagtttttgcctccgcgctccagcctcaccttgctgtctccaaccttcagctttcaatgctagcatcaaagcttggaggtttcacatcatgtctcagtaattggaattgaaattgatgctaactcctcattagccaagattggccgcatcaacttcaagctctaccccgacgaggtccctaagactgccaagaacttcgctgagctttgcaacgccaagcagggtgagggctacaagggctcttccttccaccgtgtcatcccccagttcatgctccagggtggtgacttcacccgtggcaacgtaagttttctaatcctgacaaccgcctaatgctcggtatctgattttgattttaccggaatagggtaccggtggccgctccatctacggcgagaagttccccgatgagaacttcgtccacaagcacacccgccctggtcttctgtccatggccaacgctggccccaacacgtaagtctcagtcttgtatcccggctggtctacatccagagaaccatactgaccgtttccctcttttctagaaacggctcccagttcttcatcaccaccgttgccacctcgtggctcgatggcaagcacgtcgtcttcggcgaggtcgctgataatgagtccctgaaggttgtcaaggagatcgaggccctcggctcctcctccggctccatccgctccgctgtcaagcccaccatcgtcaactgcggtggcaactaaaaagctcattctggagatttagttgggtgttgggaggatgaacgtctttcttttcgtcatggacttgcttctttcccaacgctctagtgcggcgtgggactagcataggtggctttcccttttgcgccttgtaatctaaagtttctaccaagctagctcatacattcctatctgtcgtggggacttaatgttcaatttgaggattagtagttttgtaagagcgacttttctagatattacctttgagccaagctcctaaaacctgcatgtcaacctaaacatatttcgagtcaatccacggcaaagcacgaaatcatccaggtgctcctattgccattccttcccaggtcttctcccagcaaagaaccccacgtatggtgtggtggttcgatcactcggcggggtctgcggctaactacatcaccttaccccgcgtgcggcaggttttttttttttagcggaaaacgtttccaccgcctccaatagataacctagtaccttggtagtcagatgatattagtaatgggtgatgcatactctactgtaagtctgtttcatttattgtgagagggcaattgagtagagagtaatcgagatagaagagatggttcatacgtcatggcattacaggtgagaacaaaagacaagaacagaaacaaggaggaataattgtggacacaagcaagtgcatattaccctctgccatttcgagacagagaaaacaaataccggggatatcagacgcatccagagatgctggtgtagaatcaaatcgtaattggaacgcaagtcaagacaacacaccatgcccaggcatttaaccacagcacttagtgacagacgtagcatctgacctgaagaagaaagaagccatgttagccctggtgaaagtatagtagttgaacgaaacaacttactccttattcaagtccaccggctcccaggagaagatgaacgcgcccaggaaggcaccaatgaagatacagatgatgatatacccattgaagtacatagcgagcagcatgatgatgtacgcaacagcaaactgcgtcatatgcagcagcgagcgcagagaatgctcaacaagcgacggacgatacggggcaagcaaagcatcctgtctctggccgccgacatcccgaatgcaattagccggcgcagcagcagagacagaagccttatttttcgacactccgttctggggagcatccgacacaggagtgatgatgtcgtcgtctgcggaggacctagcgtcgatctctgcgttgccgccgcagcagttgccgggcggcttggtggtgtctgtgtcttcttcgctgcgcagggggacgttggagatggattgcgcggtagaagagtccgacatgtagagtcttcgaaggcgggctcgacgcactatgaaggagtcgtattctcggcctagacggcggaggaactcaaggctcaatacgaggcagatcactccaatacaggagccggcgaacatgccgcgcgtcctgatgtgccatgttttggcgaggaagcctaggttggtttagttggctttatagccttgtgcagagggattatagctggggctgcgtacatgagtcgattgtataccagttccaaagcatctgatcatgactgtgagtaagcttgaatccatacaaggtagtgaatgtgcgattgatattagacggaccgatattttgcaactatgtcccacgtccgctttggtggcactggccatcgctgccgaggctgtggcagtggccgttgacatggtcatcccgcccatatccatgattgattgttgattggggaccttaggagcactggatcgagatagtatcgtgttgattgaaactgaagggaagcagtacaaaataaatgcaggagtagaatagaagagagaataggagatagatagaagaggggagcacttcaccgtcactctgccctaatgggagcaatatgagcaggtttatagatttggccctaaaaacttagcggcgaggtggtttgagcaaattctcggatttgggctgtaactggtaacattaaacgtaagacagagggtatcaacttgaactattctcccgtttgaatctcctttttgattttgtttgttttttgatttttcttttttttttgcgtcacccccgagatcctttgatgacaccttccaacaactcgcggatctgactgcacccatcgatcccgaccgccaacattgtctcaaggtacgtagcatgcaccttagactccatagtaagcacacacaccttcattgcctcttcatcgtcatccatattgttctcgccaacgggcaccgctgtcgtcgtcgcaacagtgagcgaaggcagttcctgttcttctggaagagataggtccagcagtgggtcaagctcgtcgtgtcgcgggtcacgcggtgtagaggcgctaccactcatccctgcagtacagccacagagtagtcctggcatagggattccggcgtccacgagcgctagggtacaggcattgatcgccgcggcgagcagtgatccatcggcagatagaacggagatatgaatgctgattgtgctgtggggatagaggtaggtgtggaggtgagactggaaggttgagcggatgattgtaccgattcgcgttgattgtctgtagtccccaggagattagcattggttgtatctagtctggtgctactgtgactatttccctatagcaggaaggtgcaatggggaagcgtaagagggtgcatacctatcacttccaccggctctccgcttgcgatctacgccggcaaacccagcgacgttgacatccacctccacaactgcatggccacttcctgcagcaccactatctcctcggcgaccctcggcagggccgtggacagagcacatgattgatgtgttgcccatggacaagtatgaggagcccgagctggcggggttggttgagatctgagcttggagcaggcggagttcattccagcgacggccatcaagacgaagccgcgtcagagggtatgtcgtcgaggtgtctagcggcatctttgcggctttctgataagaacgagagttgtcttgagcgaaaagagggtacgtcaagcgggaagtcaagctttattttgtgttttctgtgggcttaggtcagtagggcgttcctttatcgagcaatgacagacgtagaatattgtcttcgacttacgttgactttgtcgcatatgcaaagaatcgaatgccaaaccaatgagagcatctttttctctggttctcttgcacgtgaccatgtcgaccaactctataaatccagaaagaaccatttcaaccacttctttgagcatttaggagatatcaacagagacccaattctttttgagatagaataaaaagcagtttaccacgctctatattgaaggatactcaattgaagctttcttgggcgaacagtttcaaattcactacgtggccgttatcgcgtgccgtacttgacgctttgtcgcgacagtctggtactcccttcggcctacgctctgtcactatttgagtcgtattttcagaaatgcagagaacatggctaataacgaggatactgacgaggccatcatcattgattcagatgatgacgacttggaggtgacgcactatgcaactccgaccgctaggggtatgacacctcttcgacgcgtttgacagacagctcacattctctcaagacagattttccggtctgaaacacggggctgctacaccggttaaacctgaatcgtcgcgcactcatctttccgagtcatcaagtgctgtaaagatccagcccgtggacagcgatgaggataataccaacgatggcgagctagcgtacaagaagttcaaggaacgcaaatccctcaagcgcaaacaagatgctgcagcaactcgcaaagccaaggcgcccaggagagatgcaatcgttggtcgaataaaacaagagcggccaacgcctcggccaaagcggccgttgaaacaatggggcgaggtatcgtcagatgatgacctaatggagaatacattacctggatacctcaaaagccgccgcagccagttcgaccagaagctcgaacatctgaaagatcatggactgaagctaccacccacctatgaggatgtggacttctcagatgatgaacggcttgaagaactgcaagaacgacctgtctttccggataatacccgaaagcaggagtacaaggacatccaacttccctattcgatgggtattatacccgccccgatcgcccagtggttgcggcagtatcaagtggaaggagttgcctttcttcacgagctgtttgtataccaaaagggtggcgtcttaggagacgacatgggtcttggaaaaaccattcaggtcattgctttcttaaccgctgcctatggaaaaacaggagacgaacgggacgcaaagcgcatgcgaaagatacgcagatcggacgacagcgcttggtatccacgtacactcatcgtgtgcccgggaagccttatcgccaactggaaggctgagtttgcgtgctgggggtggtggcatgttgaaagctaccacggggataacaaggaccttgctctcgatgcggcgaagtcagggagggtggaagtcctgattacaacatataccacttatatgaacaacaaaaacgccgtcaatatgattgaatgggactgcgtcatcgcagatgagtgccacaagattaaggagcgcaagtcggggaccacacagtctatgaacgagatcaatgcgttatgtcggataggcctcaccggcacggctatccagaacaaatatgaagaattatggacccttctcaactggactaaccctggtgttctgggcccggtaagcacctggaaggcacaaatatcggagccactgaagatcggacaatcgcacgacgccactctgagcgagctcagccgagcacgaagaacagccaagaagctggttgagaatttacttccacaatttttcatcaggaggatgaagtccttgatcgcggatcagctgcccaaaaaggtcgatcgggttgtcttctgtcctctgactgagacacaagccgaggcctacgagaatttccttgacagtgacattgtcgattatatcaagacatctacagaaccatgcgattgtaggtcaggcaagaaggccggctggtgttgtcgccgctttatccccgatagggaccctccaacctggcaatcctatgtgttccctgctattaatgtgcttcaaaagctcagtaatcatctggcaattctaatcccacaaggagcagacccgaaggagaagcaggaaaaagatagagattatctggaacttgcgctgcctgaacaatgggaagacctttaccgctcgcgcgactcgatcgtcaattacgcgaaccctgagttttgcggcaagtggaaggttctacggaagttacttaagtggtggcattcgaatggggacaaagtcctcatcttctcgcatagcgtgcgtcttctcaagatgttgcaaatgttgtttcatcacactagctacaacgtcagctacctggatggatctatgagtttacctgaccgttcaaaggctgtagacgagttcaatgccgactcgcgacagtttgttttcctaatatcaaccaaggccggtggtgttgggttgaacatcacctcggcaaacaaggtggtagtcgttgatccaaactggaacccatcctacgacttgcaggcccaggatcgggcctaccgcataggacaacttcgcgatgtggaagtcttccggctcatatctgccggtacaattgaagaaatcgtctacgctcgacagatctacaagcagcaacaggcaaacattggatacaatgcaagctccgagcgtcggtacttcaaaggcgtccaagagaagaaagaccaaaagggtgaaatatttggactgaagaatttcttcggatatcagaacacaaacatcgttctgcgcgatatcgtcaacagaacaaatgtcgccgaaagccgtgcgggggtacaggtcgtggacatagacctcaaagctgaagaagaaggccacgactacaccgaccgaccaatgaaatccgaagacgaagcaatgagccaaatcgcggcgatgatctgcggcgaggacgaagaaaaagaccacaagcctcccgccggtcttccaatggcaacaccgcataagcacgaccccgttcaagcgattctggcaagcgcaggcgtggaatatacccatctcaataacgaagtgatcggttcctcgcgtgttgaggaagatctcagtcgtcgtgcggaacttgctccaaatgacacgacaggtgaccgtcaggtcttcatgtcctcgcagccttactctcagccaacggagcaacctgtgcgattcaagtatcatcctccgggggatgtcatacgtcgccagttttgtagtatggcgcggcggtttgggtacgctgatgctacggagtttgcgctcgttgttgagggcatgacccaggcgcagcggcgagcttgtctcgatcagtggtatcgagagagaagagagaaactactttctgcggatcaaaacactaaggaggagatcaaggacgaaaatgtttctaaggaggatatggatgaggatgaatggatcaaagatgacaagggtcccaaggaggatagtccgagtctttgagtggttttgctttcgttgttgttccttcttgcgcgatacccctttctggttgtataactagttgtataacatgcatgaaataatacgatactggaccacactcgctatatggaacctgtaaatcgttggtattaaaccattctcttagtatggctgtaggtaaatagatacccatgcaagatcacaacataggcggggaatcaaagccaagccaaagtccacaatgccggtaaattgggatatcgttcttgccaatccgccaatatctcagggaccttctcgtcaaagctctggcgggcagggccagtcccgtttgcccagccctcagagccatgaacaagatgctcagcaacagcagcctcattcagatgattggccagatcaagaatcgcctttccaccagtcaaggcctcctcgtggttatccttgatatcgacattgaagacatgaacggggtaattgagcgtgttgcccttattcatcaaatcgtcgacaacagcatcccaacagcgctcttcacaggtgatgatgacatcgacgactccaccctccgttccgatcgcacccttgtcgcccttggagaggttgtcgatgcgcgggacgccagggacccagtcctggaaccgctcgggcccccacttcagctggcggttgcggtcgagcatgttcaggatgccgttgccgcggtacagacgctcgtctttgctgcacaactcttcgtacatctggttgtaggaggtcgtgttgaagctgtacacgtttggttgggtgattgatgggccggggagacggacgagggagcctgtgccaaaggatatcacggggaaggctgttggggcaccggagagctggaggtgggcttccattgagcggttgttgtttgaggcgcagactgtgcagaacttgagcttgtacgagtctgtggctgcaccagccgggttggctgtttctagggcttgggctgctgaggccatgtcggtttgtgtggatgtctctggtggtggagggggaggaggaggttggggagttgaagtccccgagtttgttcggcggggatcatatgccattttgatggaagactatggagatgataatagagagagagagactaaggggttgttgtttctagagggattttggaagtcgatgatcatgggggttttttgagattacaatattctgttgactatcagacgcgttagcagctgatttgagattgtttttttgtgacatgaaatgtgataacacaagttcagaaaaaaagcgtatatgaatttatccgcatagcaaaagctcagacagctccaataatatattcatcaggttgagggaaggagaaggtgacacagcacacataccttgtagttatcactcattatccagttcaaatgattatggggccgtagccctgggagaggagagaagagcaattttggtgaaggttgaaaagcttcgttttgttagtgccctggattagtcatgtagttaccgcctgttattccgcctggatagaagagctaacggggtaatattctgccggacaaatatcattgaggtatcttgaatctgttgtaaacatcgtccttttacagatatctctatcttataaggcctctgtcacacttttcacttttgtttactcttagggtatccatcaatatttaacttctcaaagcttttgaattcctctatattcctgtccataacctctatcaacagatctctaccccacatctatcaaaaaggagactcaaatggcagcaaatagtactatcaaaccagccctgattgtggtggacatgcaagaggatttctgccctccagtgagttggataagtacactactaggtcacacatactaatcaacagtagcatgggtcactcgccgtgacaggaggccgcagcattgcctcgataatcaacactctacttgcaaagccgggatttgtcgtgcgcatcatgaccaaagactaccatccaaaggaccatatctcatttgccagtaatcacccagggcctgacaatcagcccttttcttcattcgtcacaatgaagaatcccgctcgaggaaaggaatcagaaacaaaaccacagcaactctggccagttcactgcgtggctggtacccccggcgcagaaattatcccagagattgacacctctagcgaacatctagttgttcgcaaaggcatgcgcccggaagtcgagatgtactctgtgtttgctgatgctttcggaaactgtgaccatggaaccaacgcacattcggtcagtctagatgttaccgcggctctcagggctcaaggcgttacagatgtatttgttgtgggcttggctggggattattgtgtcaaggctacagctcttgatgctgcgaaggttggattcaaaagctgggttgtcgaggagggaacaagatgtgtcgtgcctcctgcttgggattctgttaaggaagaacttgagactgcgggggtgtctattatctctatggacgaccctatcatcaaggagctaggagggaagagttgatatgtcttatttctcatcttgcttttaccacgcagttttcccttccaagtgtttatttttccgtgtcttgtgtctaatatggattcaagttctatgctaccggccttagatatctattgtgtagatattatgaaggtgctatagatagatactgtattttcacgtgaatgtgttactttaccctgtgtggcggtattctcaattcttgatttccacagtctgtggttaaattgaagaccacaaaccaccgatatgtatacttgaaacaattccaatgtccgtaatcagtcagtacaataagatcgccggtgggtacatgatcgacaagcaactgccagaaacgtcttgacttcataccccctttccgcactactgcagagtgacgtcgtgtcaaggggggattcaccactcagcatacaacatagaatatcatatttcactacaggccgaactagatcagttcaaaactcaatctgcgcgcaatgctgcactccaggcggccatcaatgcccgccccaatcggtaccctcgacgagaaatcgaccgacaccgatgaggcagccctacacttccacgatcacagccaggcctctggaagtctcccatattggctcgtcaatttacctcggtcgcaatggactgccgagtgtcctagttttctacgtgaccaatctccgaagaatatcaaatgcctctcaatccctgattgccggtatacccgacaggactgggaggaagtgaaggagatcataggtacagctgctggttgggtgattagtgatatacttaactaactacaacttgcataggaaccaaccggatcgaccggttccagcgggtcccaagcgagctgcgcaagtatctggaatacatggcgcatatcaaagcggagtatacatccgtgatgagatttgtggtcaaggaaaggctgggctggggggataattgggaagagatcaagcctagaggtggccctttcgaatacgagggtatggcgcaggtcaccgggtctagaacgcgtgaaatactaattgtctgtatagaggatatccgaatcatatacaatgactggccatatggtgttgccaaggatatcatccacttggtagtgtggaccaagttcgagctggaagatgacccaaccacagatgacctaatggcaagcacacgagcggccatagagagctatgtgcaggacacattttgctctcgggtaccacccgaacaggtatgggggcttagtcggcatgaagatgatgaaaggctgacaacataggtggtctggttcaagaactggaagtcactcaagtcggtccccgggattgaacacttccacgtcatgctccatcgtcccgatatggcatttgtcagggagatcacccgcggagatgtacctctgattgaacggctatgatgtctgtgtctgtgggttagagaagagagagaagagagggaggatagagggaagagggagagaaaagaaagattctcctttccttgggtataacttaggtaccaagcataagatacatatgcagcccaaggaacgggtacatcctgtagtccccgccaagccagatgcccctcactgacgatcttggggaatgagatgtaaaggagtgtattcatcttgaaggagaggtcagagaaatacgtcactagccctgagcatttgcatgtgtaatttgcatttcgcatatctttttggatatcttgttgtgtaatttttagtgtcgttcttagtgtctttttcaattttttccctttgaactacgcaaatccgtttttttgccctttttccacttctccatagtaaaaaaagcccgttcccgaaatttccgccccaagtcagctgtcttgggtttcagacgttctctttttgtgttttggttttctggttcttctttatattttcataaatgtttgaaagcttaaagggcttttcgtataattcacttccgaacgcagccatgcctgtcccgcatctccgccgtacctcccaggccagtgagtttgacccttcttatccctttgtcatacatccaatacattcaaagcatttcaacatggcaatcaacatggcaactaacgccaatctaggcagatcatctatggaagattctccggcaagtggggaggatgaggtggttgagccagagcagggaaatggtgcgtccaaaccctcgataccccccagacacacaactgacttgatatgcctgggcagttctttcacatatcatttctcagctacggcctggcgccgacctgagtcgggtcgtcttgccgacattcatcctcgagcctcggtctatgctagagcggatcaccaagtgcgttcacacccctccaagcagggagcttggagctacctaatatttagatatatcgattaacacaacggtcttactagcttcatggcgcaccctgaaacgctcctcccgatgtcagagatcgaggacccggtcgagcgctttgtctccgtggtcaaattttacctgagtggatggcacatcaaaccacagtatgtcgcccgctagctgtctgtctaggaacacatactaatacccacatagaggagtgaagaagccgctcaatcccattcttggagagacttttacctgctactgggactatcccgacggaacccgcgcctactacatctccgaacagacctcccaccacccgccaaagtcgagctatttcttcgcagcgccggaccataagattcgcattgatggaacactcaagccccgcagcaagtttttgggcaactccgcggccagtattatggaaggtattgccattctgcgcctgatgagccacggggataaagaaaagggtgaacgatagtatgttgcgccgctttctacggactttcaggcactaaccaaaaccagtattctaacccaacccaatatgtatgcgcgcggcattctattcggaaaaatgaagtatgagcttggcgatcacagctacgtgcgttgtcccgagaaccacctcgtggccgatatcgagttcaagaccaagggatatttctccggcacttataacgcaattgggggaactatcaagaatgaaaagaccggggaggtgttatatgaactctccggattgtggaatggggagatgtatctgaaagatgtccatgtacgctccgccttccgaggtttcttcccgattcaacgctgacccagaacagacccacaaacaagacgttttgttcgacgcgaggcacgcgaagcattcgcctccgttggtccgccccatagaccagcaaggagaccgggaatcgcagcggctatggcacaatacggttgaagcgattgtggcccggaaccatatacttgcaacgaacgaaaaaaccaagatcgaagaccgccaacgagacgagactgcgaagcgcgccgacgagggaatcgactggcaccctcgccttttccgtgccgtccaaggcggccctggtggcccggatgaaggcgaagaagacctcgactggataatcaatgctcaaatgtaagcacgaatgctccagcggttaacacaataactgacagtcccagcgacatgcaaaatccccaggtcgccaccgagcagatactatccatcgttcccatcgtccaaggtcagaaggagtcatcccaatttcaaataccgccgcatcatccccaccctatcgctcccgcgaactaggatatcaggcatatccctccacaaccagctaatgccgcacccgcagactccgagacgaaaacaactgtccaccagagcatcgtggaacggaaagatagtcaaacatcagaagaggagcagtttgtagacgcccaggaaacctcctaagtcaacccccaaagccccattgcgtccgactcccaacccccgggcccccaatccatgctatcaccgacccaatccaactcggtcggttgcgaaggtcgcctttttttctcactctcacatctgaatgatcccggagtattgtcacactccctctcttcctctcttcctatcttcctctcattctgccatgacgtagtcaacctgcgcagaaatccccagcacaaccacaactcgaggcgacggcacgacccattgtgatagccctctctgcccctctgatgtttcaacacagcgtttttctcggtcatcatgccgctcctattgctggatacccgatctgattttatttaaaaattcaaaaattttcaaaattatatctcaactgaacctgggcacatacatctctaagggatatggaagagatacgtagcaaggttttaatgcagcgttaaggagacataaaacaatagaacaaacaagagtcacgggaatctgaaaggattttatacacttaggacctggaatcttcaatctctgataaatctccccatttgctcaagtccgtagtattgactgatcgattaaatttgcgtcttctctgtccgttactatacaaagctctcctagaagagagggatatcacaatagatggcaaccacccatgccaatattaccatacaaagacaaccgaaactcccctccgttatccgaatacatacaaaacgccgcgtcaaaccattcttttgtcctaggaggacttgccgtcataaagccgcactgggaaagctcatgaatacagttcccccctggatccagctccacgctccagatcccgccgccgattaggccgcgggatagcaccagcagagccagtataagccaagccagaaccagccgccgccgccgatgcagcagacatcgacccaccgccctcatattcctccatctcctcctcaacccgaagcgtctcctcctcaatctccttctcggtatcctcacgcaaacccaatatgtccggggggataaagctcatctggacactaggcgcgcccttgatatacctcagctgctcatggacggcctcaacaaggccctccaggtacgcgcgaggattcttattatcaagctttcgcatctccgacaggggcgggaagagtgagaaatcagggccgaagtggttacggaaggcgacagattccgggatcacggggtcgatcatgttttctgcctcgagcaaaatcgaggtctcgtgcgcccacgcacgcgagacgttgcgcggggtgtagccaccgccgccaacgaccatcatgggcagcttgaaggtcttggcgtatgcgacacaggcgccgtgcgcgcgcacgttcaggttgaagcagcctagtcggtcgcagcccagactgtcggcgccgcattgtaggacgattgcgcctggttggtaggttttcatacatgcaccgattacctctttgaatagtgctatgtaggactcgtcatcgatgccgtcgttgagcgggacgttgatggcgtggtgggcgcctgggttgagtgggtgtgcggggcctgtgtcttcgcgtgcaccggtgcccgggaagaagttgtctttgtcgtatttgtgaaaggagactgtgagcacgcggtcggttgaccagaaggcctgctcaacgccgtcaccatggtgtacgtcgatgtcgatgtacatgacgcgcgggtggtggcggaggagctggagtgtgccgaggacaatatcgttgacgtagcagaagccgctggcttcggcctttttggcgtggtggaggccaccggaccagttgattgcaatgtcggattgattgttgcagagcttgcgcgcggcgtcgacagtgccgccggcgtatagcgagctgtagctgtacagtccgtcgaagatggggcagtcgtcgccgaaattgaagcgcaccacgttatctgcctgatcggggttgtccatgtcgccgggaatgatctgttggaggaagtcgaggtagtctctctcgtggaagtcggccatttcctcgtaggtcgctgcgcgcgcaagatacagatccatggcgtggtgcatgccgtatgccatgacgagctgtttagtaagtgtgaggcgccatggcttcattggatgtgactggccgaagtggtaaggctcgacggctggattggcatgccatgatacccggtaaccttgtggacgagctatttgtaggttttgaagctcggcgagggacttgtagtcgacggtgagggtcggggcgggcggtgcatattcttgaacgacggaggagcgagccatcgagggagtatttgggaaacgacagaggatcaaaggattggcgctaagttcattttagatgggccaaatggaattcgagatgaaaccgcaggaagttcatgactaagcgaatctgcggggtggccaaagatcgccatgtttagtctatgaaaggaaggaacagacaaacaggaaggagcaaagcacctaggcagttttcaattgaaacggaagatagaagagcttctcaattgacatcaattgcctacatcacaactataaattatactttgcctatagtgaaaactattctgtactgtcccggtagtgccccgcttgaattgctggagctcattgtagccctaggtctgcgtattcaacgttgctccgtttgagttcctcctgtgatgattgtggcattaggagatatcaggcgatccttggtatattccaaggttaattcacaataccgcaacaatcgatatctggtaatcacaactacaccgacgatcttcgctgaatcaataagtctacataggtatctaagctacccttgtgtttaggatgttgatgtaaaggatatggcacttcggggcgatatcggccgcgtggctctagataagtggagagtgcacatcatccagggattgtaattgcccgaaagaactcactggtggagaagtgatggtccaaggctggtatcacatgtcctaccgccggagagaaagctatttgcacggctcgttcctgaggtgaacatatatcagccccgagtcttcacttagacaataactatacggatatcggattagccggcaagccactacatcactactggttctgtttcttagtatacgacaacaatcatggctcttccatcggcagcaaccagcctgcggcgatcactgcaagatccccaagtattcatcacagccccaggagtatatgacggaatgtccgcacgactagcactggcagcaggcttcgacgcactatacatggtatgcaatgcaagatgaccaaggcatcctcatccaagccccgagctgacaccaaccagacaggtgccggaacagcagcctcagtacatggccaagcagacctcggaatctgcacgctgaacgacatgcgggcgaacgcggagatgctcgccaatctctcaccgcgaacaccgctgatcgccgacgccgacaccggctacggcgggccgatcatggtagcccgcacgacagaacaatacgcacggtccggcgtggcggccttccatatcgaagaccaggtacagacgaagcggtgcgggcacctctccggcaagcagatcgtcgacacgaagacctatatcagtcgcatccgggcggctgtgcaagcgcgcgagcgcataggtagcgatatcgtgatcattgcgcggacggactcgctgcagcagcacggctatgaagagagcttggcgcggctgcgggcggcgagggatgcgggcgcggacgtcgggttcttagagggcatctcttcgcgggaaatggctcgtcaggttgtagctgacctggcgccgtggcctttgctgttgaatatggtggaacatgggtccacgccttcgatttctgccaaggaggccaaggagattggtttccgtattatcatcttcccgcttgcgactttgggcccggctcttgtggctatgcgggaggcactggagaaattgaagagtgatggcttgcctggtctcgacaaggagttgactcctcagatgttattcagggtatgcgggctggatgatagcctcgagttggatgcggccgctggtggtgtggcgtttgagggtggcgtggatatcggagatgaatgaacggaagaccaccgcctaccagacccggtaccggagtgagatattgtgcacattgaacattggcaacttccccttaagagtatcggcctggacttatgtagtaccgtctccaccagtcgtatgactctattttcgcattcagccacattcattagtaggaagtagctgattctttgaagcgtttctcgaattatcatctaattaaatctactaaattttatatgtggctttcttttgtggttagggtaatttgacaggtagatttaatttcctataaccaataggacaaattgcagatcgaccgaaccgaggatcctcccgggtcgaccttggttttgtttatttaccccgagatttctacttcgtacggtttcctacaacaaggattttaagagtgaggaaatttagagtccaagtgtgtacatatgtattcaagggtcgtgggtacctgcattaagtgaggagtctgccagggactggctcctgcacgaattagccctaatgtttcaggaaacgcctgtggcaacaaaatgcccttggtgtaccgtaaatacggactcaaaaatacacgatataggtacgatgcactacttcctccgtacacctatggagccgtggcaagccaagcgcgcttaaagtttcaatgagtctaaacagatgaaaccgcttcacggccagccccagtttgccgagttggaaggtctggatccccgaggggccagtttctgcgtgccattatggagacaatcaggagactcgtcatgtgggtggggaagggctaagacgctaccggtgaatatatgaaatatgttgtaagtgtgtgccttacagaaaatatccatcggccgtgtagggggtctggccgcagatcaacggcagagattgacttttttatgcgcatatcattgggtccgatgggcagggcgaggacaatcctcattaattgcaacaagaattgtaatggaagaactaaggagtagataggcatgggttgggtagggacatagatgttagttgcccattgtccacgtatttgtacacgatgcggtgatgagttgtctccattaagattgccttgagattcgtaacacagtttagatccttgctgtgcccttcgccgattggtttatgtggagatttccggacgacggggatattaaagtacatgcgtaagtttttatgtacacgtatgttatacagaaaccttggtcatattgcttatagaagtatcaatgttgggctctggtgcagtgtatcgagatgactatccagcattccgatcacgcacgtgtttggcattaggcaactatacaacatagaacactatcaatcccaataataggacgcataataatagaacatacggggtacggagtactccgtatgcgaattatatagaaataataatacaacatactgaataggagaaatccccctatcccaagtcacgaatacctgcacagccgcgatgagaggcatagtatagagaagtacccagtaccaaggaaacagagtctgggccctgggcagcccaccaatcaaatcacccaaaacaacgcacggccaggaaccgccaggaaccagccaataataaatggcgtacccctgatattctggagccttttcgggtttgggttcaggtcccagcctgacccgttattgtgtaacttggtattgtactaatagtctctagtccccctagtccactttgttctcttcttctctcttcactctcacacacattcatttgaattgaattttcttctcgtcgagcgtccttttcgctcaagtcactcattttcaagttattcaattcccaagatgcatttctccaactccatgctgttgatgacggcgctgaccgctgggtcggctgtcgctcgtcttcatggccacgaccgccgtcacgcccaccccagagatgtcaacgtcgcagtccagcccgctgtcactgctgctgccgaggttgccaatgttgataagcgtggcgaggaggtcttcgctaccattgacggcaaactcgtctcctggatcaacaactggttcggcgacgagacctcgactgcctcctcggaggctgctgaggccaccgagtctgtcgctgctgccacttccactgctatttcctccgccgaggccacctcgaccgccagcgccaccgccgttgcctccagctcctccagctccagctcctccagctcttcctccagctcctccagcacctccagctcttctagctctagcaactgggccagctacccctccgatggcgtttactccaccaccggattcggtgcctccactgccagcaagcgcgttggcaccctcgactgggactacatcggcaacgtcggcagcccttggggtagcaacatcatccgtgtcgaggaggacactgccagcgagtacaagcacgttatccgattcgagaacgacaacgacaatgcctggaccgtcaccatgtggaactcgtacggccccaccggcggtctgaacggtttctggagccccaactccgctctgaccttcaccgttgagcccggccacagcaccttcgtcgccatcgatgacaactcccagggtggttggggtgccgccgagggcgaaggtctccctaccaacaccgtcggcgagtacgcctccacctggggtgaattcgacatgagcaacacccagaacgacggttactccggctgggatgtctcctgcatcatcgctgagcttgctgatctcgatattgctggtatgcagatttgcaaccacgagggtgcgaagtgctcctccatctccagcggtgcctccagcgttgtcagtgcctacacagccgccgaccagggcaagaccgacaaggccattgcccagtccgctggccccgtccgtcttgttgtcaacctgggctggtcgtcttaaatcgtccatgctctttttattttttatttttttttcagcacctcccatttctaacaatcttatcttctctaccgagatttcgtctttcttgcgcaaatggttcaacgccgaaggtgtctttgtatctttcccctgattcggtgtgtgcgtgcgcaggtcgcttgccccagcaaccatcctggccacacatccttccaccttcgagcggctcttcgacggctaccttttttttgccgttgacgttctcatacatatctttgtggtcatgattgcctccatcgtctttttctctgtacatataccatctgaagcatctgatttgagagttgatatcatttcctttatcatttcatctagaactggttactatatatactttatttacttaacggccattgggccccgatacctatggatatctaaatataccatccattcactattctgtctgttcatctcgccggatcattagtgtcgaggcctattcgtcagtcataaacctgaaacaaaccttatctatttcaagtctcacctaccttaaagctgatgtgcatgatccttcggcactatctgtatgtcttgcatgaaagctaccccttgttttgcatatcgaccgatgaaacctaaatgccaggcccttccagcttcaatacaacaagttgaatacaagtcaaaatactacgaggacactatttagggctcccatggttgaatgtacgagagatgtgaagtgccgagttagggcttgcgaggaatgccaggataccacattgatatttgacaagaatggatgtttccgaggttttttcgaggcctcgatgattttttccatcgccaaaggaatattgcgttctttggaataaattgagttcgatataaattccagaacaaaggagacgtttcaagtagaggaccaaaacaaagacctgcagttctgatgtgacgaggaaccgtacgaaggccaacacaatacaaaggatagaacgcaatgctatcgtacagtcttagctttcacccaaatgataaaacaaaataccgaccccgtaacatccacagaacaagcgtaaagacttcagcgcttagaacgcgcccaggaagtcagccgccgacccaggatcaagctgtagcacaccggcatcttcatcaagatcctcctcttcctggacacccccagtcgagaaagaaagcaagcccacatgaaccatatacccaacgagagcagccgtccccgcaacagcagtcgcaacagacagcaacatatccttgttactcgaatcggcatacgaagacaggacctgtttctccaccgcgctaaaccccgaatcagcctcaacgacctgcttcaaccgcctgttctggcgcacctcgcgcaagaacggcgtgttatcagccagcgtgttgaggagtgtagacccgacagcggcgacggagatgcgctccggtgcgcgccacggcagggcagctgtccccgtgggctggagagcatatttagcatcgacaggcgcgtcgccgaaacagcgactgcacatgcgctccgtgtacgccgccagcagcggggccttgatgcgcattgcgtcgcgcagccaggggaagactagcttcgggacgagcgccagcgacaggtagcccagcgcgagacagtccagcgaggaggggttgttgttgtcgtcggcggggagcaggcaggtcttggtgcgggcgagcatggcttcgagcggctcgaagaagtcggctgttagggcttccaggcggaactggtttgtttgcgcggtgcggccgaggagcttggagactgtgtcgcggggctgctggatcaggttgctggggatttggccggatgctacggcggcggagtgctcgcgtttgcgctggtcttctagtgcttgcaggtctagtgaggagaggccgaggtgttccgtgcgggttttggcggcgccgtgcagcttaggtgggaggatccattggtttggccattggaggagagagccgtacgctggggatgtgttggcgtagtagttctggctggttacgtagaggtacaggtcgatgagggattggccgcgagattcgatgaaggaggagaagctgaggggaggggttattgttagtattttgtgcttctcacgccgttgtagaggtgggagttgcgtacgcaacgctatcggccctttgcactttgtctaggttttgatccaggttccatgctccctccgagtattggcggagatagtcgacgatgttctggaaccggctcacccagacggagccattctggagagcggggagctcgcctattggtaaatcatttgttagctgtctgattccggtgatgctttttttttttgttccggtcacgtcactgacctgttggggacacggatggatcgctgctcgcgatcagctcccacgagtctttagggaggacctcggcacagtatgcaattgcagcaaggcatggtgcgtcaattgagggcagcgaaaaggccgggccccatacatgcaattgtagtaccatggtggctttgcgcttggagaagaatggacatccgcgattgatttgggccggcgaatcacgtgtgtttgtcctcggcttgatacatggcttctataactacatgtcgagatacaatgtttattcacatcaatcgagcttggattgtttgtagatgtgatcttcatgaaatcagataaaaatccctcactcttctccaaaatggtccgttctcgtttaaccatagtacgatgtatatatagcacgtaccagggccatgccatcttcaacatccaagtcaaaatagaaataaataaaaacaataaagtgtcacgctaacccccaagcttcttggaagtcattattaaataaaataaaaaacaagatgtggcttgaattacgaactaggcaacgccgttccattctggcataatcattgataattagctcagtatctcgttttggatagattgccaaccttcccggattggaatgccagggattctcggccagggattctcgagacggcaaatcggacatgtatatctttcactgccccaaagcatactccctactcgacccgctactcccgaaggtccgggcatcaatctcactcagccgggtaaaaagtattgacgtcaaactcaacgggcctcagtcgtacgacgcagggcatctagaacattaagagcctcaatattcatattcaccgcctcgtggcacagctgagcaccggcaatagcgcccaacgcatccgtggtgtacttatttcccgcaaggttcctcctgcccaagacaggatccttggccgccgtatacatcacgagattcccattacaagactccatatctccggttatccgactatagtgatatggatacccaggggatgacctcattcggcgcacgtggctatacaagcccaggtgggccacggacttgtcaaccggtgccttggaagggtttcagggttaatttcagaagcacagacgtccccaagggcctgagacacgttgagtcaaaactttaggaatcgttagtttgattaaatatggagattgtcagggcgagcgttacggccggaagcttactttctcctaggtacttcctagattgtaacgcctgaagtgaaacaggaagggaaaaaagtcaatttgatacaaatccatggaaggcgtcgcggataacaacggatataccacaaaagtgtatcgggttgaggggtagaggcgggggcagacacttgggaacactatctgcgagatccattggacacagattgccgggatttcttcaatgacgacgacatgcaactttatcggtcgagtgatgggccaacggtgaaccaggataccagcacgcccacctgtggggatggtctaatgacaatcactgctcgactatggatgattggttgtaattggttagaagaagcagtctgagcatggagcatttgttggtccagctagtactgtactggaactagtaacaatagtgaggccaacctccactttgctatacaactcgtaacaggaaaatgcagggcacgtaccaaacctggaagcgctcggacggggccaagctcgtatcttccttccttctccgctcggccgtttagcgtttaatgatagtattacgagctaaatatacacacgctagggaaggtgtcgatatgtcctagtctggcgaatattggattccgtgtcgagttgaatagtatggtgtgatttgagactagggttgagtcgggtgcaatatggcatatgatacccgatatatatacggattgcacaatatatatgtaaggccatgtggccatgcatcgtactcgatgcggcacatgcgctgtaaaccataatgggaggctcgataaggatcgcgtcagatcaaggctacttcagatcttatgatggaagaagtgcatgggcaatctgcagatctctagattggtctatcgaccagtgagtcatagttgacgtgtatattcgacctcctcgtatctggggtgttgattaatgggtgaagtatgcgtcgattcgactaccgcgacacccgccttcgtgagatccctgctagcttcatgactagtgattgctgcgggatgctgcctgattagtgaaacgggtcaggtgggtgtcacccgcagtttcccatctcgtttatgcacgacatacgtgtggaccatacgcaattaagtaaatgcaacgttctagataaaagacaaattgctctgttgggtatactaagtctatgatacatgtcgattcggattggccagatgcaggaaagaaaggaaagtcagaaaacagaaagggaacaaaaacaggattaaaaaagaattccaggcagtcaagatgaacaggtcacaacggcaggaaaaagaaaagaaaaaaaaagacactgtgaccagcaaccagtgagcgaccgagttgatccgaggtaccaagacaggaggggttggccaattaatgcgcggcggctgaggagctgcaccttctccgcatctgcacgtcacagatggtcaaagatcgaacagctgaaacaaaagccccgcagacgaccggtgatcaacagtgtcgagagttgaagtgggacaaagagcaagaaatagaaaggctattaatgcacgaggggtagcgccggcgctaggtcccatagcgaacgagttaaggttgctgaagagcgagagaaccaagcaaaagagaattaaaaagtgtgtccgaggcccattcgaaacaagtttttcagcgcgcgtagagctgcgatggctcgcgaggcgtcgaagtaaaatgtcaagagatgtgaatggacggtggaagagcgagcgctctctttgtgttgtccgtctcaaaccccaactttaagcaagggcgtcctttgtttgggcggaacgtagtggaaattaggtgttgaaagtccgaatcgaaacaaaggatcgcaggtaagagccgaaactaggtcgaagtcgaggtcgtgagatccatgctgagggtccaggtcgtgggcggatctgggaggaccagaatgcgccagagtcatcatgttcgttgagaaaaggggactgtggactgtttatttcggcagcggaggcaaagggcccttaggaggaggaccggggcatggagggaactgagaggatccgatggaaggcattgtggttggaaggttggaggttggaggttggaggttgaaggttgaaggttgaaggttggaagttgggagttgaagttaggaggttgagagtcgatcgtagttctgacaacagactggaagactgatgggctagtatatgtagcaagatacgatgtgagtagagtagatttggatggagagaagaaggggaagaaaaaaagttaaccggagcaggactcttatagaaatcgtctgcctttcccccaacctttccggccaaccactaattacagactaaattagttcctaaaatccccatcggacatccctgccatgaacaggaggctgagtatccacctgatctgacgtagggaattttattgcgatttacttgctcgaattagcccgggtaacggatgaataatgcaccccaagtggaaatccaatggaaaattcccatttttttctagaagctctccactacttctgtggcttgtgtttcctgtgaaccactagtggaggagagcggaggaaaatgagacacagtaattagacatctatgccgtgctacctgagcaatatccatagtaccaatgcagtccagcatatatgggctcacttatgcagctcccaaatttatattcaggtttcacaacccccctctgcgtatatactcaatcatgaaaccacgcgagatgacaactagtaaagggcaatctcccgtgggcccaccgaggctccatagagacggtttcttgatgcggtgagaacgactttttttctatttttcttttttgaatatgtcatcttattagttgtgcaactgtacagagtactgccgtaattggaatatgataaacggcaaaggtccatgcacattcatcctgtatgactcaataggagagaacagcaagacgttagggcacaacacgtgcatgtttgcagatcccgagagcgaaggagcgttagcgggagagaaaaaaagcaaaggggaaaaaaggaaaatagaaaaagcaaaagaaaaaagaaaaagaaaaagaaaaagagaattttcattctttttagggtcaaacgggatggccgattcgtattgattacactaaaagggtgtgacagccgagttcccaagatgctgggattgtagaataaggataagcctgctcatccggcatcccaaacaacctgatatgacatatcagacacgcgctatttctgccagtttagcctgatacttatacgccatccagatagcaacaaacagggtggtacggtctcaggggccgacgagaaaagacggaaaaaaaaggataaataattccaaaataaataattcccaaaaataaaaataaaataaaataaaaaagcaagaggcaaaagcaaagcaggcttgaaatctcgaatcgaggacccatcctcaaccgtggtttctacccgtgctaccaaacaaataaagccgtgattgagacatgcaagaatagaaaagaactctttggggtaatgcatgtcagtcccttaacccacgggtttcgcatttacttctccgtaagcacttcggctattattacatttcattatatgcttcgtaccccgtacataattccttatcgtttgctcctcccgcttaggccctccggggctctaataacaatatgtaatacagataaaagccgttttgggtcgtttagcgtgtaccatcatctccgacggattacagagccgatcagcctccgcctatagtaggtgtggctgatagtccctaggtatgatcgtcttactgcagaggactgtgcattgcacatcatcatttggaaagcatgcagaatagcgtcgtacatctggagaaggatggatccttgtactccgtatgcaatatatgaccccagtccttatgtttattggctattggtgagcattgcatcgagaggggtttgtccaacttttccttcatcttcttagtggttacattgtgcacatcactgggcctggtgtttcacggtggaagatctacttcacccctggtgtggcgttcatggcgtgattattatgggtagcggttacttacttcgttgaatgtgtgtagtgtggtatgcactgaaggtcgaagtgtatataagtatatagtgtactccggacggactatgcagtactacttacctagaaattccctagcttcggggtgcttacaatcttccccggaaattacctggccctaacatatgtactgcaatggtcacccgttacattccgccatcattccctgtttttggcccttttgaaatcacggcaaatccaggcagagggattatattactgattgtactccgtactccgtacttctggaaatccacgcagatgcactccgccctatatagtaagcccgtgctaatctagaattctcacatgccctatgttgcaaatgcaggtataaaacatataacggtacccgggatttgcaaatgaaacccccgcatatactcaaaggggtaggtaaaaggaattacaaatgctatgataacaattggactccgtacggagtactcggtacgttactccgtagcaacagcataatttgactaggcctaccgcgtccgatgaaatgtacggagtccaaagtggggcaaagtggcaaagatacatctgtaccttggaaagctgtatgcgaccacacgggtgtacctgagctaagggtcggcgaaccaagaaaggggaaagaaaaaagtgggaaaagtggcaaaaaaaaagggcaaaacgcacatgggagaaaactctacccatgaactagcggaccgcagacttcaataaacgagcccaattaggcaaagtcagctccacttggatttccatctcaccgttccgcaccgttggaaataaaagctgtggagttgcgatttgaagtcggagatttatgacgagttcagcttgctactagtaaagagatcggaagttacccctgatcgtgctacgatcggtttgagatatctgatatggcctgtctattggctgttgatttagagccaagggattttaaagaagagatctgaggttgagtacacatacactataaaatatagttcaaccaaaaaaccctttttagccatgtgatttgtattaaattttcggtactgaggcttatgcccccgaacccagcacatcgggaccagaatacatacttccccattaagaaggtgttggttggggtcacgggacaagacggagacgggctgtttcaggtcaaggctgaagctccacttgagaatcttctagcttgccttctggaagttgcggcccgaggttgagagcccatagttaccacatagggttttcatatgtggaatcagaatgtctccgaagtaattggaatatttccatgcccttgtccgtgttctctgccgtgtcacgaatgcgaccgagacatgcaaaacgagaatcattacggagtacagagtaaaaaagtcaatatcacattatgtcttattgcatgcagatcatcgagatgtcactatttgcatgcacccctgtctcgtggttgtcatttccatctcagcggctctgtctgccggcaccgtgcctgaagaagtcatccggggagtctgacagcctgccacttgcgtgacctgtctgatcttcggaaacccacctgcccatcataaaataacattacacagtgcaattcatttcgcggtagtggcaaggtttaggctctcatcagggacacctagtctcgtagatcaaggagttgacagaccgcacgacatgggtccctgaacctatgattcaacaagatgaaacaaaatatctctcccgtttgcaacagggaccgatgaagcacaattttgtgacgtttgcagggagtttgaacatcacatcactcataatcgtattctgtgcttgacagtgcgggcagtgcgggcagtgtcacagggtcatgtgccactgatcatcccaccacggctgcccacagtacgaggttgggaaagcttgacagtaagcaaggtccctgtcagccacactgataattgccaggcccacaaacgctagctatctagcttgatcaatcgtcgtcaaccgacgcctgggcttgggttgaaatccattcttccatcagaggccgattcgactcagatgccgcagcacttggtctggctttgtcgcccttgcgggtgatcaatagacatagcacccatccatggataatgaagctctcataatgcgtgctaaaacggagcttcttttcgtcactgccagtcgtgtcttcaggtggcacctggccttccctggttgtcctccttctcttgctcgaccgacgtccattccctagggcaacttcatccgcagattcgggaatattatgcaattccagatcaggttcactgtcactctcgatcatgatttcgccatctgagttaaccttggcagctgtatcgcccgagacatggtctggtgccacctccatttgtacgtcttgatcttcattatccttcccctggaatgtcttgctgcgcgtgaggagcgaatggcgggtacgggattggcgaaggaagatggccacttcgaagtcatctaggtagtgtaagatacttgattcgttatacagagatagagaggtctataccttctataatgacatccttgactggcttgcccttcttgcgcaagaacaaccgctcattctcttcacgcagcttcggaaggaccgacggtcgaacggcagcgatgacgcgcgggaggacaggatcgcgagagtccaagagccatcgtgaatcgggtgggtattcgagataaatgcgacattccagtactgagtatttgctgatgcggaggtatcgtcgaataggtgccatgttcgaatgtgctgcgcaagggcgcggtcgagttccctatgacctcaagaccattgccaagcgctgttgccgccgacctctgattggcgatcgagacgcgtgcaaggggctgaaaggactcttgcctcaaggggctgtcaaccacgttccttcaaaaccttcgaatcattccagtcttcctatcctattccatacagaatgaaaagatggaacaacgaccacggaacacaggaaagacctcatttcctatacacgtgacttgatcaccgcgaccgcaatcggatactgacccccaaggtcctcaacacgctagtgttaggtaccgggtactttcggatgcaaccaaaattgtgtgggcgctcaagtacctggtaccggtccgatggagtagaaaaatcaatccttgacgtcttcgcactcccaaggtccccatggatcccctccagtgctacttcgtgattaatgtaatcaaaaacccgcaaattctgattcggttttgattctgtctttcctttaaaggaactcgttgatttattatctatacggttaggttccctcagaaaagcaagcctctatttccttctcgatatcttccgttcaatcagtatcaaagtcaggatctcctggtaattgcatgcatggttagtggatcaacgactcatctcgcctaccatcgaggaccttggggattgcagtcaagcctcgcacattctcccctcaactagatcacaaatccttctctcctccattggacaacttgcacaagtcgtgtgtattctgttcacttccattggctcctaaacacatccttctcgtcccacctctacacttccccatacttctcgtatcaccaataaaccgagatggaatctttttccactctcctcaagcgtgaggacgcttgtgattccgggaatgagttcgacggccggatgggcctgcggatctcttccgtctttgtgatcatggcgggctccatgtttggtgccttgttcccggtcttcgcccgtcgctttagcaagaatggtggatttcccaaatgggcctttttcgtcgccaagtacttcggatctggtgtgatcattgccactgctttcattcatctcttgggtccggcggaggaagccctgaaaaatgagtgcttgaccggtccaattactgagtacagctgggtggagggcatcatcctcatgaccattgttgtcctattctttgtggagctgatggttatgcgtttctcgcactttggccaaggtcatgtgcacgacgaggaaggcaatacccacacccaactcgatgatcactctattatcaacgaaaccaacgagccgaagactcacatgccaggcgaggatcaccttggtcatacccttgagcatcacgataacaacagcgactccgagaacgacatccaagcggttgaggattatgccgctcagcttacttcgatcttcatcctggagttcggcatcatcttccactctgttttcatcggtctcactcttgcagtgtcaggcgccgagttcattaccctttacattgtgcttgtcttccatcagacctttgaaggacttggtcttggtgctcgtctcgctacagttccctggcccaagtcgaagcgcaacactccctacttcctaggccttggcttcggaatctcgactccgattgccattgccattggcttgggtgttcgaaacagctacccgcctactggacgaaccacactcatcgtcaacggtatctttgactctatctccgctggcattctcatctacactgccctcgttgagcttatggcacacgagttcatgttcagcccctccatgcgccaggctcccctccgcgacgtgctgattgccttcttccttctttgtgccggagctgccctcatggcgttgcttggaaaatgggcttagaggggtctttgcttccatgatgatgagaaaagttatggggacactcttctctcctaataatgtgtcatgtctttgctttttctttgccagttttttttattatggtcagatattgtctgcatctgtgctatccacgggatccggagcagttttagccattcgtctatccggcgttattttagcgaatgtatcgccttcttaagttcatgaataataattccatcagaactattcaggaacagtcaaatagtagacacgtgcttatccgaggtataccaagccctaccccgaggtgaaccgtggataagcaattaggttaaattctataccaatcagaacaatcaaaagacgcctcaaaatacccctagcatccgcttaaccatttcctccatagggctgcttcctgactgggattccccgctccaactcgtacagcaggtggaaaatgggataaagaggagagaattacgaggggtgcgtgacaccctttgtttgttccctctttccttctgaaagggccacagttccaaccttttccaactcccatctctcaaggctgtcgaaatggcttcggcaagcgacttgaccgcgctccctaaggctgcgactcaagataatatcgaccaagttgactctgctccttcatcgggtatgtcgttgaagcaacaaagtctgtcagacctcttcactattgtgagtacttcatcctagcctattcataccagatttcttcttgctttccccgcactcgcggctcaagttagcgaatgacagactgaccaaagtggatactattcaatagtttgcaagcggcttcgctctgatcagcgatggataccagaacaatttgatgtgggtcgagcgattgtccccatgcacgactgtatctaaccacggaacatctcataggactatgaccaatgtccttctcaaaaaggaatatcctaaggagtacactaccacggtcagcacgcgcgtttcgaatgctctacttgttggcgaagtcattgggcaggttgttattgggtacgcacgaaacaatgctgattaaggctatggacgagttctgatgactgatattctatactagactgacatgcgactatctcggccgtaagaccgccatcgtctttacaacccttatgatcgtcgtcggaggtatcctggccacggcctcgcatggcgttaccatcgatggtatgttctggatgatgacggtggcccgtggcgttgtcggattcggtaagtgaccctcgatatatttgccttgcttgtatatctcaaaactatcattccgagttgtgtactctactaatcatcctcaggcgccggtggcgagtatccagcctcttcaacttccgcctcggaagcagcaaacgatctaaccccgaagcaccgtggcccagcgttcatcatggtaaccaactttcccctgtcatttgggggcccattcgcggtgtcaatcttcttaatcgtactctcagtttgccagcagtcccactacagcaccgtgtggcgggtgtgctttggcataggatgcatctggccgctgtcggtgttttacttccggatccgcatgctgaactcggtgctgtaccgacgtggagcgatcaagaaacacgtaccctacatgctcgtgctgcggtattactggaaagcattgattgggacttgcggtgcttggtttctttacggtaagagacccccccagtacttacagacgtgtagttactaacatatatagactttgtcactttccccaacggtgtcttctccggtacaatcatctcttcggtcgtgcacaacggcacaatcctgcaaacaggcgaatggcagctcctcctcggcgcgatcgcgctgccgggcgtcttcctcggggccattctctgcgaccgccttggccgcaaacccatcatgatgattggattcagcggatacctgatctttggcctgattatcggctgcgcctatgaacgcgttactaagatcgtgcctcttttcgtcgtcttctatggactgatgcagagctcgggcaatttcggtccgggaaatatgctcggtttgatttcgtctgagtcgtatgctaccggtgtgcgagggacttgttatgggctctctgcggctattgggaaggcaggtgctgctatcggtacacaagcgtttcagcctataaagactcatctggggaacaagtggacttttattattgctgctatttgtggcgtggttgggatcttagtgacttacttctttgtgcctgatttgacgggcgaagatttgagggtgcgtgatgagaagttccgtgcttatctcgttgccaatggctgggatggtgatatgggcgaggacgatttgcaggcggctgctgatcaggtcatggacccgggttttcgtgatgttaaattcgtgaatcagacggtgacggcttagaattgcggtgcactgcaatcgtcaggcatggccgaaggtcgagaatggggatatcataatatccccatatggcttccaaacccagtttccatatctcaattgtttaggtagaaccactgtgggatattcgcatatttgtagtccacgataacacaatatcttcaaatcccgaagtctatagttacagccacctacgtatctccagtctgcttcctttggcgtcgtaatgtataccaattagtgccttgtgagtcccctctctcgtctagtccaaagagcaatgataaaacctagacaataagcaataaatcccttgtagaaatcaccaattgacaatcatggactgcaaccgcaaccatacatgtaagcttaaagcacagaccaacgctaaacctcggtccaatctccgcccatctgtccacatctctccaattcccctctccccaaaccaccccataaacacaaaatgcgtctcacctccatcctcgtcgcagccctcggctcactcgcagctgccgccgacctcggcatcgaagtaacccacgctgtcgaatgcacccgcaagaccgtcaacggcgacggagttgccatgcactaccgcggcacacttcagtccgacggatctgagttcgattccagctacaaccgcaaatcgcctttgaccttcaagctgggtaccggtcgtgttatcaaggggtaagttaaaagctgcccggggctgtttgtggatgtcaatctgcaattgctgcttattatccgttgttcgcgtggaagctaattcgtgtgttcgttgtatacagatgggaccagggcttgttggatatgtgcattggcgagaagcgcacgctgactatcccacccgagttcggatacggcgaccgcggtgtcgggccgattcccggcggtgcgacgttggtatttgagaccgagttggtcggtattgatggtgtgaaggatgagctttgagtgtgcggtgcttgatacctacgtatgtgactatctgggatggattttgatgacaaggccgtcatattcggctaagaacaaatatacctttttgcatgcgatttattctatgatatagcagaagggtatctcatttatgtggggtaagatgtacactgtatacaaaccggctgaacaagtacagcgaagtaaaacaacaataataaagtggaccatgtatcagtccatcgcgtccagagcattctcggtttggatatcatgctcggaaaccagaattcctaccagacactcgccaaggatcccctcccagttgacccacgggtggatctcctggaacaactgtgcagagtccttccccgcgcctcgaaggagttcacccttcccacctggatggtaaggggcgtagggcgagatattgtacacctttccatggtacgaggtccaggcatcacgacccttacgtccgtgctgctccttcagcattgacggtgtgacccgcaaaaggcctgggggaaggccttcgccgcggagcttgttcttcgggttcgctgctagcgctgcccagtcaaggggcgagaatcccggctccagaaccactttgcgcgatgacgactttttcaaggatacttgtgtcggggctagggtgctgctgctaagacgactgccgctcctcggtgcgcctaggccgcgctgggaggcggctgctgatggtggtggaccgagggagttgccgctgagccgtgggggttgaagtgtgcttgtgggggcgaggcggttcgcttgagttgctggtcggggccgtggtactgggggaggaggcattagggaagaagtgccggttgttgttgctctcgggggtatagatggttgttgttttggagggggtgcgagggatggctgcggtggcggtttgaactttggtgcctcatggtttgtcgaaggtcgttcctctgctgttccattcacggtttgtggaatggacggcatcgcggcaggttgcgatgtctcgcttccgccgctgtctaggctgaatgtggggaccgcaaggacggggagtggtacgctcgaggccgaagccttgggtgtgctctgggaatcctcctcctctgtctctattgatggcgtcgaggcccgtgggccatgcttccgctgcacaggctcgcttgcggtggcagcaaccggcgcgtcgggtttaggttccggagaggcaaaagaacgaggttcggcccagctgcgaggagggtaacggtagagaaagtagcccgttgttgcgataagcacacccacagctacccaacccataccgactaaatcagaaaggcagtgaaagtgagaaaagtagtccagaatgttgtccctgattagaatcacaatcttgcagattcgccgagaaaattggtccgtgcgctataaatatgcaacattcgagatatgcttaatagaaggttaaatactatttggtcaagtgatattcaataattttgttaattaattagactaattaaattgagacatttagagaaaaaattgttattttctacgctgtctacccccaagttccgaaaagaaccattgcagtcaaatatcagacattgctaggaaagaaactatctggggagtaaaggaagaactccggggaagccatcggggaagccattgaaagccaccaattggatatcggtagtaaataaaacagcaatcgaaaacagaacgcgttcatgatgtcagtgccccatcatctacatatatcgcgatggtatgcccttaggagagattgattctgtatgccaactgcgcaagcatggttgtggctcacaaagctctgagggaccagatgttccggaaatcaatttctacctcagacacagtcacacttcttgatgccggggctggtcaagtgagtgtcaaggcgcatagccctcgtacaattatacttatcaataatcaaatggcagtcccagggtggtaggaagcatcaagaggatcggagcacagtgatctttcccaatcattttccttcggaggtgaaagacgaagttgcattcttcgcaatctatgatggacagtaggaaaagcctcaaaatgcgtcctttacactagtctcgagctgaccaatatctccagtggttctggattggtttcggatcatgttaatggctgtttgcaccacttgatcggacagcatccggagttcgaacgaggtaattggcctgcggctatcaaagccgcattggcggaagaagacagcattatgttggataggttcaagcatgaatctgccgagcctgccatttcaggatcgacagtggcattgtgttgcattaatctcaccaagggcgagctggtcgtctccaatctgggcgattcgcatgttatcctggccgagcgggaccggaaaacagagcacccgtatcacatcgtgcgcactgtcgtcaactcgaggtggtttgagcgtggatactaacaaccacatactagcgacgtctcacagaggcccacaagccctccgaccccagcgagaagacccgaattgagaaagcaggcgggcaagtcaatgaccgcagcggtacagagcgcattggtgggttgagaaaaagaactggcctccaaattgaatattaactcttgagcgacaggttccttgaacatgtctcgagccctaggcgacctgcagtacaagaatccggtgaataatacctttacggacaactccgtgctggaccccgccgcgtcggctagcagccgaacggagtctcggggcaacttcctatccaatgacccctacatctcgcgacggacactgaacccagaccgccgttacctgctcctagtggtgtccgacggagttactgatcgattggacgacacaagcctggttcagcacgtgatgaagttgtcgatgcggggaaaacgagcgaatgagattgcacaagaaatcgccaccaatagtgcgaacaagcctcacagtgacaatgcaacgtgtattgtagcgatgctggatggaagggtatcgtgagatgtagaatattacctcaatgccacaagatatactccgtacttatagtcctagagtagttagccgagttgggcaaagttccacccggaaaatgttatgcagctgtgccactcatggcctaccaacggttcgcgccttccccaatgaagaaggtggtttggactattttggaattttggaatattattatttcctcatattaaaatctttcgactatttcttcttttcgattgttcctccgagactggggggaaagaaaaaaaaagaaaaaaaatgtatgcaaatcaatcgtggcgtatttagacggagaacccttggtggaatctacaaactcgaaggaaaacttggcttctccgcggcttccaagggttttgtactttcgtcccattaaatgatgcaatttgaattttatattgtataaactgaatctagaaccgcagtgcatatgcaccctctgcactccgtatcaaatgctacaatcggatcctccgtaacctcccccgccttccaagggtgccttatcgcttactgtcggtccctgttttatccaaccagacctcgggatccttcgtacaccaatggagctaccgttgaaagcagaggctccgacatgggggggcaggaccggtctgttggaaacctgtcaaaccactttaggcaggcgactcagtctcggggtggagctggcaaaaagaagcataagatccggctgtagccaccttccagaacggtcattcctgaagaggatctcccgagctcgttacatacaaatcgcccgtctatcccacgggttttccttcttcccattcaagtcagatttttccatttctgttgcgttcaggactatctttccatatattggatctctttgatcctgacagcaaccctcaaacatccgacatggcacccaaagaatggagcaacttccatgtgggaagagaatgtggccacctcaagtggtcccgtcgaaacgtccccaagttcaccatctcctccggtgagactgtctctttcgatgccatcgacagtagcaatggccaactcaacacatcatccgaggcctcagccatcaagacgttggatctcggcctggccaatcctgtcttcggcccgatctatatgaacgacgcccaacccggcgatgtcctcaaggtggaagtcctagaccttgaggttgctgactggggctggtccgccatcatcccgggcttcggtctgctggcagacgaattcccagagccagagatcaagatctgggagctgaaccgcgaagcaggcttcgcccaattcaaacacatgcggatccccctacgtcctttcctcggttgcatgggtctcgccccggccaacgacgaagaactctcgaccgtgccgcccacaaacgccggcggaaacatggactgccgagagctcagcgtcggctctaccgtcttcctccccgtccaaaccgccggcgccctcttcagctgcggtgacggtcacgctgcacagggccacggcgaggtctgcggcaccgccatcgaaaccccgatccgcgctaccctccgcttcgaactcctcaagaaccaaccctggatgactgctccccagttccagactccccctcgtgcccaaataccgaaccctcttcccgaccttggaacctatggtgctctcggtattgctcctgacctatacgaggctaccagaagtgctactcggagtcttatacaatggttggtgcagactaagggtctcactcgcagcgaggcatacatcattgctagtgttgctggtgacttgcatattgctgaagtggttaacgtgcccaactttgaggtggccatgaccctgcccttgggtatcttctcttgattttattgtcgttctttttcgaaatccttgattagtctcaaggcatatgttgacgtgataccctcctgagaatatttgtgatttcatttcggttgggcatatactggtgtgattggggtgatgtatttgcatgattcagacaagcgttactcaagcgagcattatattccgaatacggagtcttcttttgatcgagaaatagctattccatccgtatgtgccgttgcattggcacagtgccttttctatcctgggcctcttaactcgaagggcttgattctggaatcctcattgaacaaagtgatgtcctacagactgtaacgaggtccacctaaaggggaatattccgcttgatcccgggataacccttgatacgaatccaccaggatgtgggtactgcttcttaggcgtcgtgtactctgtcgtgacggtcccaaaatattaaaccagtggggtccggacatgtgtggatagccaaattggcccgtgcatcgatttatattgtctgtcatgtctgctgttagacactctggatgctaagctttgcgtgctattccaatattccgagtgtttgtccggcactagcttataagtagcaattcctccgtctaagtgagtatccgattcatttcatctcggatctcaggggggcacagattgaaattgaaatcagacgacttgcctacgtacctggtatcctctacaacttggtttctctaaccttgtcgacggacatgacgtaacatcgcttgatcttctaatattgtccacgcctcgccggtaacacaccagaaacattggagtcacataggaaagacgtatcggagttttatttttggaactatcttagagggagataaggttctgcaatcggcaggttcggtggacttgatcgagaaatacatccatagtaagaaggttaactagagtcatgcataagatgaatatagacccctagggcctaggcaaataagaattatgctcaagtgataagcgaagggtaaacactaaaacgaaaatggaagcgaagcccagcacaacactttatcggacctgccttttatggactaatggccgcgtctactactatcacccatcccgagaccctctcttccctacggaatacttggccttctggaaacaatgacggcagcgcactcccgaacttcgccacataataatgggccgtgcatccttgaaatggtcaggcatgtcccgcgttgctggagcgcttgtatcagataggcaggtcgggatccggcacggcgggagacatcgggcccactcctgaaggctgaatcaaaatatcgccaacagaagatgggaaggggctttgtgaacgagtcatgcgatgatacatccgaggtacaggaatataactatctcagtctttgtacaaaagtacaaaagtaccaattccacttggttagacttttccgccttggtcaaatgccaatgtgaaatgtattattagttacataatgaccagatggctgacgttaaggtatcatcctatgtgtcaatctggtgaatttgcgtatctcgtgctgttcttagtggcacttggactcgtttatatgccgaacgagtgatttgaagcctcacctgccaatctcggtaatttcatagtggagttaggtagaggggctgtcaggctgaactaaaggggtggtaaaatgaaagccttattcatgtatcaataaatattcccattagcatgaagcttaacatttggaagtgtcgctaaaaactcatgttgattactcttcttatatagtgaaaaaaagtacgaattttgagactcaagagcagcgcctacgcttttgctgcaagaataccatcagcatataccagaagactacgcaagtgaaaagtaggcatagctatgggtaggatgccacaaggttggacataagctccctctattctaaccgcaatcatccactctacagacgtctttggggcttgccgtctcacaactatcccctcaataccatctctagggctcgtatctgaattatcaagttttcacaatcgaagacaggtagttagcaagtactccgtaccaatccattaattcttcaaacagtgtcctcaatgtagagtggaagtgtcacatgacgtcgcgttttctcgcgtctccccctcacaaacacccgaggattggcaaacaccccacatgtcatggatccgattttagacggcttgaatcatgcccagcgggaagccgtcacttcatctggctcaatcctgcaagtgctcgcaccgccgggctcgggtaagacaaaaacattgaccgcacgcgtcgcgtacctcctctcgcaccacggataccaaccgcaagatgttatatgctgcacattcaccatcaaggccagccgtgagatgcgggagcggctcgcaaaactcattggagaaaaactcgaatcgcgcttgattctcggcacctttcattccatctgtcgccgctacttggtcaagtacggatacttgatcggcctgcggaaggggtttggcattgcggattcggatgatacccgcgcaattatcagagtatgagtagtacttttaaattatatcaatttgtttctattctctaattgtcactgcagagaaccattaaacgactgaagtctagcattgaagtcaaggcggcgcaaggccgaatttctcgacataaagcacatggactcagtcctgatgccctggctgacagagccaaagcagaggagttggagcttgttgatatctatcgtgactacgaatcagcgctggccgcctccaatctcttggattatgatgacctccttctgcggtgtggggatctgctccgagaccacccagaatgtgtctcaaatgtgcaggccgtcttggtggatgagttccaggacaccaacatcatacaatatgaactgatgaacctcttcgcatctaagaaccgacggatcaccatcgtcggagatccggatcaaagcatctacgggtttcgttctgcggagatccagaatctcaagcggatgcagcaccgatattcaaacacgacggttgtactgttggaagacaattaccgctctgcaggttctatcttgaatgcagcccaagaagtgattgagcaggatacgagccggcctgcaaaggcattgctagctacgcactccttcggaaccttgcccgtgctaagaagactcccaaatcccaacgcagaggcgcagtggatggtacttgagatcaagcgatgtgcagcgatgaccggcggtctactgcgcatgtctgactttgctgtcctgcttcggtcggcttcgctgtctacacaaatcgaaacagcttttggaagggcgggtataccgtacaagatggttggaggcagaaaattctttgaccgaactgaagtcaagattcttctcaattatatgagggtggtgagccatacgggacattcggacgcgttgatgaatattgtgaatgttccgccacgaagaattggcgatgagacaatcaagcaattgactagcggtgcggagaaggccaaaattcctctatgggacttcatcaaggatgtcatccaagggcgtcgttcgactgagaagaaactacaaaaagctgcagagcagggactctgcgttctaatcaatttgattgaagcctctagacagaagttgcaagagtgcgaggatgcatccgctccacgtgttctgattgagttcattgccgaacgcctctcattccaagaatatctcatcagagcatatcccctagacgaagacagtcgctgggcgaatgttaaagaattgatgcatcaagccagtgaagtcgcagcattcgaggaggaggttgataaagaaatggatctccctgaaatcgaaggtgtgcaacaacagcaggcacatcctggcgaggaggctctcactcggttcctggcgaatgtcgccttggctacggagattacaaccaaagaagaagccaaagagggaaaccaaccgcaagagaaagtcacgatttcaactatccacgctgctaagggcctggagtggccagtcgtatttgttcctgcagtgtacaacgggagcattcctcactcgcgtgctgaggtaatagaagaagagagacgattgctgtatgtcgcgatgacaagagcgcaggccctgttatacctgagtgttcctattcgacaaccgcggttaggagaaggagaagctggtgccaccactttgacgccattccttcctcccaaattgaccaaatcgcgcttccggtcaacggggccgtctctccatgagaaggtggtgtatgcaattgccgatattctgcgtcgcccgcggccatctttagacgacatttacaaggggctcgagtttcttccatcgacgctggacgaccgatggacacccgagggcgaggaggaccgcagcaaattcgatggcacatctacctctcacgacgcgtctggcgagcccaatccaaagcgtcggcgggcagacatgaaccagggtccaaaatcgaccacctacatctcatcgaccgggtataccatgaacaactcgacagggtttacgattcctccaactggtctatcgggttttacgtctgcccgggattacatagcggccaaccccgaaccccccgcggagtcagcctcaaaggctgatgcagatgcagatgcagctgggacaaacagaccgaaaccgctcagcagcgcaagccgtaaagacggactcacacaggcaagcatatccaacttttttgcaggcccaggatcctcccagaagagagaaccagttctgcctcgctatccacagccaccatcgcagaaccaacgctcaggagcaagaagcattgtcccatctaccctctcctctcaccgtgttcagccacgaccacttattccaacaaggccgaccctggagcccacggacccgaatggttacacgtggctggcaactccatccaaaccaacaaccctgaaagctgccaggatgtcgaagacgcaggaacagaacggcaatagtacatccgcaggcggaacagccggggcagacgaggtgaaacccgagagctccaccgggttccagccggtgtcgacgtttcacagcacgacgatgtcaatgatccaacaagcaccgcgacggacgttgggaattcggcggagcatgaacgggtggcaagaccggatgaagcgcgagggcggtggacaggcgagctgacacgatttacgatttcaggggaggctggttctagaatcctgacggggatgggttatgtttgtccacgggaccaggtcagaagggcagaaggggtcaggcaatccacacgcttcgcaagcccattgccggttcaggcgttgctagggaagccctcccggggtatacttagcttggaaagtgattgaccaggaaagggttgactccagggccagaatctcggtctagatggaatgacgcacatccgtgcactaccaactagaccatgacctgtttatgcattgctctatagggagatgtatatgtacctaagtttcataattattattttccccatgggatgacccctgtatgaactggggcgggcagatcttccgatggagcctaatacagattagccaggctgaggattatggacaaggaacagagtgtcgatttgcatacacaatgatcgagacgtaagattctggaccatagtggggttccaattacggtgaaagaatcaatagttagccagtagcatgtcgtacaacatagtatgatactatatacacgcactctgtacagccgccattgacgcatcctagcggtgtgggaagcgaggaatcccctcaacgtaacgatttattattatttggttagttatttgctattttagttacacgaccagtccgattctgtaaataggacgaagaatggctgactcatcattattggaaatagtaccggcacaaagccctagcaacttctctccttcatcactggctgccctactttcgatcgaccctctaggccaatcaatgcttcgatcgtggcagccattaccaggcaccaaatacgtcagggggagatgatccattcctagctcttgtcctcttttgggactagtgagctgctcgacgtatgttccccagagtgtagatcggggcgaagctcaatgcggaatggcttgctatacaaaaagaagtcgtcgccctcgaactatcacttcattatcaaccaaactacagcatatcaacaacatcactattgtcttctcttatatttttgtcttcctttataccttttatctataccttttgtctatatcttaattattgtccttataatctcagttcaacactgtgcctcacgctcgacgcgttctatacatatccgttcatctcttgatctttttacctttttactctctctctttgctctctacggagtacctctacctcttttaataccctaatatccctcttcctcgccatacgccttcatctttacctcctccaccctcaaactacatacaaaccattcctaccattcctccacaatgccacacaaagtgaacgactccaattcaacactagccagcagaggcagcaacaatgatcaggtggtggccaccgaagtccggagtatgtcaagtgcatcacatccctgtcccgatctccagattcagcccgagctaatgcagaccccagcaaccaatcccgtccgcaaacctccggtgatcgttcacaacaagggcggccgaatctacgatgagacgcggccatctgactgggacaaacaacgctggaagtagttgtcctttacagttcgaattgcctacgtccctatgcatctcaattgctacatctgcatacggggcgttcggctggagagcgagacgcgaataccaccattttacacgcgcgttacaaaggcgaaaagggggtccagactaggagaagagacgaaaaagcccagaaaaaaaggaagaaaagtgaggcggtgatcgaccaagatggttcgcggagatcattggacgccaaaacccccttttttcgctgcctctcgtcaccgcttgacgctttctctttcgcccctgaccagatcgggctgcttctacttttcggattcctcggattctcagggctttggtgccgtttcttcccttttttgacttgtccatttgcctctccccggatttttcgcgtctccactcttccccttgtatcattattctggagttcgtcttccttcattcctctactctctactccccttcccccttctactttctacattctacccttccaactctactggttactgttgaacacgtgttttcctctcggcgctgccaccaagcagctagctgcatggtcatgctgtgagggctaattgggttgacacccttctatttgtttcttttgtttcttgcgatgcatagcgtgggtattactggatctgctggacttggatttattgcgaatgagcgaaattgtattcttaagaggaatttgactgtcttattatctagatcttccctttatttgtgcttctttcacggagtactccataccgtaaacacggtgaacgctggccagaaacggccgctttgacatcgtattaggccgccgtcgtcggtctggcgtcaagtttagcaattaacacggctgccctggttaaatgcctcgtgttggccgtgcctccagggttgtatatacagttatccgactcttcttcaattctactggaagagggaaagagcgatgggaatacaatggggctcgaggaaacgaaccttccctgggagtttctttaaatcaggtaggaacgatgcacttccattgctttcctttgtccatgtgatctatcatatgcagtcacacgcatgtaggtctcgtcttctgacgacctatgcgatatttaatatgtggcattgattcatccgcaatacacccaccccctcgaatagaaagtcgatgctatcaaataaccaccttccattatcatccaaagatcccatagcatgtgtccaacatttcatccattcgaaattagttcgaattgtcacgtccgcccgatgcctgaaaatgagcacgagtcgtatcgatagacgccctgtcaaattgcggatcttctacgatggtagaccggtgtttggtgcaaagtgcgctagcatttcctatatgtgactgggcatacggagtactgtctcagaaattgccgtttgatgcaggcctcggtgtgtctaacagcgcctagaaatgaagcatcgaattcgggagagtaggtggtgcgatagatggcatgtcctcagctccacaaaccgtacattctattactgagctcctccataattgcggtggatgattgtaggtggaatgtggtagggttcaaccagcttcaccaacagccgcttccttatctccggctaacaccgaacgacttgaatattattcctagacccgagcgcttttggaataaagcatcaattttcaatcttattttaacaatgtctaatagactttcagatatttatagtcttcgttgtaaaaaaaaaagtggtcaatataatatatacagggcttcgatgacagtaaaatatatatatgagaccttgtccgagtggctggatatacattttgagacactagagctattggtggaaagtatctgggtatatgccactggcaggatatacttttattgtgaaaggcaatggatatgggactgaatttcagacaagagcagcgcagagagtgacatgccgttgacataggtacggagtagaaatatggctaccatgcagtagctcgcagaaaatcccaaaggagagcacaatacggagtaccctacaagaacaaataaagactacaatttaaagcatccaaaagttcactgaaaatgggatatatttcagcgccgagcggtataccgacaccccattctcaaattcacataagaaatgaaagaaaaaggcacctggcctgccgcctcccgtgatggatgacggacaggcgttcagggcatgtgtcaaaggctagatacaaaggaaggggagagcgagggaaaagaaaaggcatccgttgattccaaatatggactcggacacccttcctccccagaagacatataattttttccgggttttcacactttttttgcttttttttgtgacctccatgagaaacgaggcacattaaaaacgggtttgagggggggttttgaggggcggggattgggtgttgggggcgcaattgggaaggcagtcaagctgctaaggattgtggagcgcagggggaatggggatatcaaaaacgcagcaccaattggcgcgcagaaatacaaagggtcaaggtgtgcatggtattccttgacagagaagagaagttaatatgacgaggggagtgaaaaacatcaaactgtattcttgaaaaacaaataaatcaacatggctcgcgctcgcaatgctagatggtaagtcaagtgcaacggatgacccaaaactaatgggtatgggagcaaatgggtatgcaatttttggaacaggaagtgaagggctggtctcgactctggttccgcagaannnnnnnnnnnnnnnnnnnnnnnnnnnnnnnnnnnnnnnnnnnnnnnnnnnnnnnnnnnnnnnnnnnnnnnnnnnnnnnnnnnnnnnnnnnnnnnnnnnnnnnnnnnnnnnnnnnnnnnnnnnnnnnnnnnnnnnnnnnnnnnnnnnnnnnnnnnnnnnnnnnnnnnnnnnnnnnnnnnnnnnnnnnnnnnnnnnnnnnnnnnnnnnnnnnnnnnnnnnnnnnnnnnnnntcggaggccgaatgcaaagcgtaaaggacgaaagtggacatagtcgagttcgggggatatagcacaggtgaacagctggtatggcgcattgagtattaagatggaatatcgaggtagatcaatgcgcaatcggacgctccttggaggcattctatgaagatgagagaaatgaaatgaaatgctggaaatatgtgcaacggccaaatttcatttggtttgctggtcgttccgtcgtttcgtttacatcccaccctgatatgtctggcacattcccatatgggtaggtgccagagggaactgttggagtgctgcttgctgcgccatgtacatagcctcctgctgttgctggtatgcttcactgttcatgtattgcatctcagcggatggtgcgggggaaggggaacagccatggtgaccagtggccattccgcggctcatatcgtgattcgccatttgtgcatgggcatgcacaagcgcctcgttgtccggggtgatgggaggagtgaggtaaccgtgaggaatagctgtcaactgctgggacttctgaggggtggcaagaccaatctccccattgtacggcttggactcgataggagtctcgaccggaggggtgcaacgggcgtaggttgccaacgaagcctggcggttgaggaagtgttccatgaccttggagacccgagagtagtgagcggaagcgtacttgcgggcgaccacggtggagggctggtgcaactgttgagacaaggcaacgagagtcatcgagtcatactgcgatgaccaatgggtatgacggggctgaggccggttaagaatgcaacgtgacaatgcaagagcggcacgggcaagctcagacgatagcttggcgacaaagtcccggtggaacaaggcaatctccaggatgtacagagccatgtgttccacctcggggtcgtaagcatcatccaagacggcgtgctgcaagaaagcatccacagttgggtgtccaatggaccagccaagagtttggaggacatgccattccatctgggtgaacatatcgtcgtcgtaaagagagcagcacatcgacttcaactccttgatagtggggacgcgatccttcttgtcattgtacttggccgcgatgagtagagctgcacagccgaccaactggtagtgacgcttgtagaccacacgcttggagcagtatcggtctaaaagattgattgccaagaacaaggtggatgggaggagctggaacgcagtgtgggcctcgatcaagaagtcaagaaggtacggtcgcataaaccactggatctcggtttggatgtcaatggactcgacgtcgggcagggtttggttctatggcggagactaggttaacaacgtatagccttggagagaaaccaagggtctggtcactcacatccatttccaacatgtgactcaggacatcgtcccgaagctgctcgcttgtgagattagatagctcatccgccatgacgtattgacgctcacgagccatctgcttggcatgctcctgtttcgcttgccgttcttgccgaatgcgactttccatgccgtactcttcttccacgaagaacgtgggacaaggacggtagttgcgatggtaatccatgattgcggaagtacttggatcaaccgaagtatgaagcacaagttgacgtatgagctttgtattggcgagtttcaacgaaaggaagcctgaagaacgggtctatcaggcaacgacggaattaagagagtgacagtcgtgtattagtgtattggaatgaatgacggagatgttgtaacgattaatgaatggaccagctgaaacaatagttcgaactgggaaaggttggccgggaggtccgaggaggatgtcttcgaagggaaggctgaaggaaattaagattagcggaggccaatgtaagaaatcgattaaaagattgtaacgtcaaggtgacaaaagtaagagagtgtggaaaggaaaagcacaagaaggcagagtgcagagatgtatgctaatatccattcaggagacgaaaagggtcatccttctgagaaatactaacccagaaaagagccttcgggtagagggcacaatgcaacccttaccgtgacggcaagactggcatctaggcaggaatgatccggtgaattaggattctgttggataccaacgaagagatggagtacgagtcaacgtcttcacccctaggctagtgatgtggaatgtggagtaggagaacaaccctatgaagggggtcataatcatcagggggatgtcttggcaaaggaatggttagaactcacacttcacagattaacgagttgaatgaacaaggctcagtgaagagactgatatagtttctgagatggaagtggtgaaggatgaagtccacgtcaagagagacaagtggatttatatcaaatatgaagatgaacaaattctagatcaggcaacaatgtcagtcatattcattaatagttccatcgtgatagtcaaggctccaaagagcaatggcaatcaacgattgacgccaatcaacaattaagtgcaatgaggtatgtggtgccgcagcctgatcggcgccccaacatgcggtatgtccagtaagagtacgggattttcatcgaccccttaaacttcccacgccgggagatatagaagcagccacaagcgctggttggaccctgagattgcatgtcaagcattaagatatgcattcctcagttgtatctgagggcatgatctcccgtctgcatggacggcaatctttaccgctcaataaagagcaacccctccatatctggctctcggtgtgttgtctcgggtgggaaatgcaaaattggaggtaaatgaggttggggctgctggattgaacatggccctgaggccataccatgattatgttggtgggtcgatttttcatgcactcattggaagggttttttttttcgtgtggaaatttattgaatctcatggctcatgttgagaaaattcgagtatccgttgctcgtctatccatcggggcgttccgatcttgacaaccatgcacacctcaaagtaccaagaaaaaaacaggatttcttacccaagttttgaacgtcaatgtctgtctgatacccaaaaccaatttgtatcaaccaaaagtcaacctgaatgtgtttttcctacactgtcgctcgtctaaccggcaggagctggaacaggagggtccaaaaagtccgaggatcagggagggcaccgggcggacaagaacgaaggatcgccgtttgagttaacaaacgtcgaattggagggtcaagtgcgaaggtcaaatcgacttgacttgagtgctagtgcagcgggctggaggagatcgactggaatgtcgaaccgtaactcagccagtagaccagactcgtggtctccgcaagattggcaaggaggaaaagggggaagagaaaagggtatgaagaagagaaggagagaggtacaaggaggaggattttgactttctctctccaggcgggtggtgggaagagaaagaaggaaaaggaagaggttaagaagctgagaagacacggagatacacacggagagagctggttgtatggtaatccacgagacagagagtggaggctgaaggttgcgtacggtaaccgtatgatttccagaatcttaccgattgtacctctggtacccagcatgtatgccaggggaccggtaattttgataactagggcttcgtctctgcaaggacaggagttgaaacctacttgcttgaaaccggcagttacatatgtgttattttaaaaggtcggaggtttcaaacgtggaacaggcacaggtacagtatgcaagtgttgaagtagctacagtaaaatagcaaaatagcaaaatagcaaaatagcaaaatagcaaaatagtaaacagaaattactcgatagtattcatacctacaagcaatctcaaatgcgatgtatctacgaggttgcatatgctataactttgaaactcgaatattgcgttttcaaccgtatgccgcgacccagtcattttcctagactagtaatttgaaggacttctgatctccgacatttcgacatttcaactctcaactgaaccttcaacctttcacccatttcaaagcctaccatttccccgtaaatcgcctttgatcatagtacaatctccaattctccgaaattcaaccaccgcgtttccctatttctgatcagacaaataaagaaaaagtataaatggagccaagacaaccgcgagttccggccccaaaaaagctcctgatcgacaagtattaaggccaatcctcaaccattgttggctcgtcatccagcaccttggttactagtgctgcaatgggctggtgtggctctccctctaactccgtacgaggcctccgatacggtcgcgcgttctagggtctcctgcgcctgggcgttgactggtccagaagcctgggattgccctgttgacttcatttgggcttttccccattcgcgtacctcagcttgggctttcctgaattgataacccgagcctcctttgtcttgcatgaatctgactatcctgcgccgtccatgtggggatatttccaagcttcggttttcggtcgcaaaagcaggatctcgcccgtaatttggacctccacgtttccatttctttttcttgctggaattggtttaattaatctgactgtcactatgtatatagttcactaactgttttagacactgcgcatgtaatttactttctcgtatacagtatcactttacaccttcatccctacaacgtctgccgcctgtgacaccactggagatgcacttgattcgtccccaacttctcgacccgagataaggttcatagacgtctcatcaagattgactggtttagtcttgagaatgtcactttttactggacgcgtatattccccatgtcgatctgcgaatcaatccctggtactaaagtacacaattgcgactcggagctttttacttatctccccttacttcatccccttacaatgcacaatttgaatgagaaccctctgtaaggtccagggattaagctcagccactcaattgcatatcagaaatatcgatcatcatgcgactcggccgtttctcaatgacatgcacaggatgcgtacacaccaagtgactggatacgatcggtctatactattccggagcacggagtaaatgcagcttgatatacgacagcgcataaggctttacatctagcacggggtagtggatccatacgtttcacttgctcaacttcaaggaatgcgggttgaatcattggttagcgccttttcattcaaactggaaaacagttgccgaagcaatgggctatcgacggggtatttccacctcgtgcaaactaacagggaaacgaagggggaaaagataagcgatggccattgaagggtgctgtcgagagtcgggactgtacaacgtcgtaaggcaagggactgtcaaataagagaactgaatgatagacatggctgatatgcagaagcagatcacaaacacccttctacaaatttaggttcgtgttataaactcccatctcatagcatgccagggacttttgttgtcgcgccatagcagcagttaaatgaatcgccgaggctttgattggaataatatgtactctagataattgaacagagtacctcttcatccttgataacctgtcagctgcagaggaacacgcctagccttcatacttgcctcggtgagtctggcccgtatgttgcgtcaatcaaagacacccatatccaaacactctcattttaggctaaggtactccgggattccacttgatctgcatatatgatccatgccagtggatagcattatatacctaattatatacttctgttgcttgagtagttcgccccaaatggcggggatgacctgtactacccggtagatggtaataatatcaaaggacattattgggtgtaccacctgaacacaaacctgatacccgtactccgtatagcctcctaaatcctcgcagcaaggcaaacttgaagaaacaattggactaaacacgcccttttgtaaagcggtctaagggaaaagggggctcccatgcagcaaatacgtggtcgcaatggggcatatcccactgcagccgcgcacagtctcaggatcaaatcagtaagagatacgagttacttcgtgtccacaaagcttgcccggatggcttggaaactaggtacgacctggccgatgcttccgatgcgcccagccggcacgctactgtacctcctgaaaaggggaagaagagccttgcggtatgtcagcttgccattttcgtcccctgactcgtgtctcgccccatgtttcaagtaccgaccgtaggaagtcctctagaggatgagagtaagtctaaagcgcgcgcatatggcgatggacataatttgagtctggacctgggctgggaattctattggccccggactctttagcttcccgtggcggataagttgcaattttatctatttttgggtatgagtctgaacctcccatttattttagtcttgggcattttgctcgacatagttctttggatagagaattacttgttagaagtgcttgattggattcaaggagtgactgatccttgtttgtgaggtggttggtaaaacctcgctggcaaacacccatgcaagtcaagtcttcaaggaggcgtcacttgtctataaatgagagaaatttaaataacctgccatcgagtggtttactgcaagatctcacccggatgggcgccgaacatgatggtggtttcccttgctcatgactctgcaaatcaagagacagtaatataacccttcgatttccctccacgttgcttatttcacttgcagtccgcgcagtggatatttcattctgtaaggggaagatccttcccagacgtcaagccatctggaaatctgtttccaatgtagatcaatgttctttggcagatgttactcgtttgttcgagggcggtgtggactggatattaggtatctcatcaaatcatgtaccagttgcatgttctgcatcaaatatcatcactggtaactgatatatagggtattcatttccaagtggatattacaagcagtctatacacacaatacaagcgcgatctgattcatacttgatatcccatatcgatacattccatactcccgaggtccgtacagggtatctagagaccaatttccgagacttgcagtagtctagtataatacagcccacagaaaaatctaccaacgaacccggcaaaacgtaagagtggaatccgatcttttttcttcgcctcgcaatcgttccaccctaacctgagaaattaacgcgctccggcatcacacgcctgctaaaccatggaaccatggccaatgcctcggacgcagaacccatggacgtaaccagaactccacgttcaacagcggttattccagggcccgtgccggaatatatcaaccatggtactattgggaaagaacggaatccttaccgctctttgcgtcctgttcaccgtccattgaacattgcaatatggtctcaaagtacgtggtatggagccctagagtacatctgtacaaactcaccgttctcttccgccccgccatgtttgatagttttccgctccaccgtctgcctagatgtgcaaaaacacaggtggcggaattggctgttatcggatagcacggataccgtacggagtacgcacaaagaggttgggattgtggctctattctcggatatgtttctcacgtgtagagcaacgggtacagcgacggggggatttaataatagctaatcattgaataaacttagaatttaacgtacatagtcctatactgttgagattatccattggaattgaactgctagatatccaaatacatccccgaacctcaatttttcccatgcgtattaggccaaaaggctgcattcttgaccggtgaaaaattgacgtttcgtggcccctctgcggggagttatacaaatgccacaaaggtttttctgtgtttagtggaaacagctccactacacgggtttttctttcttcttttcttctttcttattccttaggttggagaagtttctaggtggttgacatggtgcagctcatatggaatactcggaaaccctgaaatgtataaagtatgttgtagtgcctcggatttacgtacccctaatttccgaaatcatctccgcaggatacatgtcgtcattcgcatgtataatcctcactttttcagtgctggcattttcaagacggtgaataattgtccagcatacagaatccttgcaaagctccaccccgaataagccctgaaggacgatgctaattactaacgcggatcggggattcgagacaagattacccttttaggtatggttcaacatacacagcttgactggggcagcggaggctcaacccatggttaggctgtttttttcactcccctattccccgccccttttctttagctttctttcaattcaatttgaaatcgccactgcatatcttatgtggccctcttcatagatagggactgtaggatacctccgaattccccaaattggatcaattgacctatgtactattcgatccggtttttcaagactcctccattccagacaggctgagacagcaaaggtaatcggagctgcaaggctgttcattacgtcgctaaacctgacgcggcttagggcataaaaccgagtggagaatacccgtagtgtaaggaaagaaaaggtccactttgaagctttacaatttcaatgtaccggttactgtacgtacaaaatacaaatgtacctcgaaacctgtccgaaaggggataaattgatttgtacaggatttgttgcctacgggctttgcacggtacgtaactgaatgcgaccgaactttgaacccaaccctaacgaacactcataaatagcatcttgcataagattacgattacacttgtgcgccatgtgtctgagtggcacccggcatagtttagtctatgccatcattgcccggctcacgtcccgcacttcttgctttctgtattgcggttcgctttattgcaatcgaccaaggtttgcaggaagatgtataacatacaaattgcctttccatcaacgcatgtctttgtgatatgtgtccaaaaaagggaatagttgattcccttctacagtgggcctagaacagacatggggttggccgctcggtcaccctctactaaaggcaatttggtttcatcttggcgcgaatcccagcaaactctcgtgtgcatcatcactgattccaaggtcgtgtttatattgccgatccggtatctttgttatccgaggcaaatctgacactggcctagataccctcggtcttaccaggaaagggtccaatggggaaggtgcgatggatgccaaattggagctaatcgtgaactataatatgtgagttcactaagcctatgatctgacctcatcatccccgcagcacgcgattccacgaggctgcgcaattaggggctaccggcttgacaaataatatcatccatgtcgcctatgtacaccatacatcacgtatcgggactgccgaagagttccactgggaccggagtcaaagatcgcggtccatctcagctggatactgtacatgtgtaaacctagcttgcaccgcaccggcctctgtaaatagagacaatcaagcacaagcatagggacaatttaattgagttcgatgaccccggttggcaattccttccaagccaaccacaagcaccggggataaaacagaacaaagcaccgaggacaacatgaacgtgatcatccaaatcaatgaaatgacatgacaagtgtgtgttgtatttcccggatatcaagtgaactatcgaatccatgcgcccgaattgggtccgagcccatgctgacaggggtctccaatatcctgggccgtccccgcagctgttgctgtaacgaagtggaatcccgcgacgcaactcgcacaatcaagactatttcctcggaaatgtttcatgatgacacggaaataccacacacactcgaggttgcataaggcttacaaacgattcgagctgcgccatgagggcccccgcagcagatgtcatacacaggtcgccttatccgcactttgattcgagatcgtccaatgaagacgtgccaattcatctcagcctcccctgttctttagctcgtccatgcccatccagtcatatgttcccattgcgattatatgtgggttgcacactgcagagccaagtaccgtcgcgacctatcagagagtttatctgcaagtgtctcaggagcccgatacatgagcacgcataacaggttactttctcatcagccacaacagactatgtcaagctaaatgatggctgcttctgacgtggcagcccgtcgatggtctccctgccctctgccgaagtaggtcataggaacctgtcgcacccatttgctattgcatgttactattggttgcagactgcggcgcgcgtggcgaacttcgtctactcgcgacatgttcagctgagcctgcattttcagggcagatcctccgctggctcccttacatctggcatggtaatctccatatacattggcctcgatagcacaatacacttcatgcggcccgctgaagtttagaactgggctacagctcggggttttagtttgtactggccgaaacttgctcgggtatccaatgattccgctgcacatttctgagctagactacgacgcgaactcaagttgcttatcggcaattgctccctggtcaatatgtgcatagagggttcagtatttgaccgcttcttatcggttggtcgttgcagttcactcgtctctatctatgatggggagttgcaatagggagctcgaagatatcctacaactttcgtggtgttgcacaaataaaatattactaagactgtttgctggacaagcaaggcacattggatatatagtggttgttgactacatacgttctgaattactcgatcacacttgtgtcaatcctatctcttgtacaaaatttatacatatttcgatgggatctatgtcctgacctgtatctaggtactaacccacctcaggaaacacctgtatttcaattggaaataaagtctactaagagcacatctaatcgatggaacaagttttcactacagagattatcatcgttattgtttgttcttctcatcatgtctccagatactggcccgattcgtaaggcactatatctcaatgacttacttacacgtgatctcgggaaaacctacccaactagtcaagatattccggccgctaaaaattatctacagaaaaaaaaagcggcagcgcaacagtcgcaaggaaagctttggcaccacgctataaccacctatttgtgtttaagagatgactgtctagaggctggttttacagcctgagctgaattattcttgaattgatcttcagcacctccattctgatttgcaccccgttcaaaactatccgaaacgagctctctggcttcgaagcccacatcttcaatcatggatatccaccgctgccgtttcgtttcttacaacccacaggcgatcaatgcacttgcattctcgcaccccccgtcagcagatctagctggacgtggcgtacccaccctccgactcgcgatcggtcgtgcgaacggtgatattgaaatatggaatccgatgcgcggcgcctggttccaggagaccgtgatgcgtggaggcaaggatagaagcattgaaggacttgcgtggacactggatccccaggaggatgggcctgatggcaccaaactaccaggaaagctgcgtctgtttagcattggatattccacggccgtcaccgagtgggatcttgagaatggccgcccgctgcgccactcaagtggaaactacggagagatttggtgtcttgctgcgcagcctcgctggcaggcgactaagggcaaagacgggaaggtggtttctcccgccgagggcgagtacacgggtcagcacctcgccgcaggatgtgcggatgggtcaattgtcatcttgtctactgccgataacgacctcaagttcttgcgcctgatgcgtccttcaacaaaaagagcgcgcgtcctgagcgttaccttccaaaaccgcaataccattgtcgcgggttatgctgatagttctatccgtctctttgacattcgcacgggtaagatgctgcggacaatctccctgggcaaaggccccacgggtggcccgaaggaattgttggtttggtcggtcaaatgtctgccggatggcacgatcgtgtccggtgactcggctggtgaaattcggttctgggatgcaaagaactattctctcttccaacggatacagggccatcttgccgatacgcttgatatcgcagtgagtgccaatggagacactgttgtcagtggcggtgccgaccagcgaacggtcgtctaccgcaagaaggagggcgagaagggcgataagaaaggtcgctgggctgagattatgcaccgtcgctaccacacccatgacgtcaaggcatttgctgtctatgaaacaaaggatatcagtatcgctgtgtctggaggtatgttgaccttggtccactatgaatttgagaggttcaagcaatgctaacttgtttcgtttaaaggtcccgatgcaacaccaatcattctccctcttcgtgaattcggaaaggaacaccaccgcaagctttcgagtctcccgcaaattcctcagctcacctccgcgccgtcagctcgtttgattatgagtttctgggatagagaagtgagcttgtggcgtgtgtctcgaggccctacgtccttgcatgagaacattgatggtcaacggcataggctcgttggtaaggttctgatacagggcgaggaaaacatctcctcggcgatgctgtcctcggatggcaagacgctcgctgttgcaaccattgccgaggttaaactgttttccctccgtcggagaaagggcgacgagaagggtgctctgcgcatccagaagatcgatgtacccaaggtactttccgatgaaggtgctcgccttgtgaccatttcccccgacggccgatggctttcaatcgttcgccccaacagcgacatctacatggcacggatccagcaaacctccgcatctaatgagaagccccaggtgatgccacagttcgcaaagctcaagagagctgcacgtcatgtacgacacgaaaaggcatcccacggaacattgggcgattacgagagaacgatacgatctgtggtgttttcagacgacagcaaggttctggcgagtggtgatatctctggttgtgtcgatacctgggtactaggcacagcgaccgcacccacgaacggtaccgtcaaacgtagcggggcttcggagtcggacgatgattcatctgatgatgaagacgacgacgacgttgtgattgagggcgagcgctggactaccgctgccactgaatcaccaatccctcgcatgaattccagcataactttgttgtccttccgtcctaagtccgcccccacacaaaagcttctcgccaatggcacgcatcagtctggcgaagatcggctgatggtcctcacaagtgagcaccagctcatcgaatttgatgctcgggatggcaaattgtccgactggtctagacgcaatcccaaggcatacctccccgcagagttccgaggcgttaaggaccgagctatgggctgcatgtgggatctctttgagggccgtgagcgcctctggctctatggagcatcatggctgtggatgtttgatctgctccaagacttcccctcccccgacgaggctgctaagaccgaagagggcaagaccgcaggtcagcttgtcaaggcgtcgaagcgcaagcgcgaagccctcgacgatgacgaggaagagcggaggaaacacaacaccggtgccggtgatcgtattcctcagacacagatggatgtccactttggcaccaaggtccgcaagatcgtcggcagcgatgaatcgcagggagaatggatcaccctggacaaggaacgtccccgcgtgccaggcgaagatgatgaggcctacgagtacgacgagacctttgcagccaccaatgagacaaccctcgccagtttaagacgtggagatgggactgcgatcgaaaccggaactccacaaaagggatcacagaagcacactggcgagaccaagaagcagctggtagaggccaatggtgcctcggctcagcctgcacgtcggtggtggcacacctataagtaccgtgatatcctcggcatcgtacctctcaacaccttgtcggatgacgattccgacgaccagagaccgagtggaactttggaagtcgcagtggtagagcgacctatgtgggacgttgaactgcctggccgctacgtcaaggactacgagtgaagcagagagatgtgaaagggctttctgtaaaaaaaatagaatgcagctgattcagatatgtaatttggtttgagcatacttggggagcgcatgttaccggcgccttatgtacagggattctgaattgatgattaccccaaaaacaatttgcctataactagtggacttgtatattccctgtaatgggatctaaatatctcaagtgaagtacaaaagtcacaaaggaacagaccaacgacgatccagaaccagtgcggggcctttaggcagagtgactttaacctccgaggtcaggctcaactctcacttgacctttaaaacttctgtacaccctgagccagctgatctttctgaaaagcctttgatccgctgccctacttgtctccgtgaatcccgaatctcatcccgatccgcttatcggcttatcgtctacacgtcagctccaaggctgtgaagtccgacgacacatcctcctccttccatagcccgtctgcaagggccagggatacttctatcatatatcgagaaaccctacatttgccagaacataaacgctcgaaagattcattaaggaggtcaacagcaggactgcagcataggtccttccaagtcgaagtcagggcggggccaactactgcatacattcgaagaaagcaggcaatcacgccaccccttttcaataaacggacttcctctatattcaagtgttctctgctgcttcgaactcacctctcaggccctcgactccgatctccgatccctacagaaacgcatcccacgcctgtccggcaataaccgcataactacagccatgggtctctcatacaacgtctacttgactgccaataaaatctttggatgtaagggatgcaagactcatcttgcagatttcaatgatattatgagtcgggtatgagaattcctcgaatcctatacacttccctactatgaataacctgttactaacccatgcctttcgactccctagaactttcgaggccagcacggaaaagcatacctcttcaataaagtcgtcaacgtcacacaaggcgaacctgtagagcgcaacatgacgacaggtcgacatctcgtgcgcgacatcgcctgcagacagtgcaaggaaacggtaggctggaagtacgacaaggcatacgagagcagcgagaaatacaaggagggcaagttcattctcgaggaggagctattctgtgtcgtctgttgatgggtgtgagactttccacctatcttcatgtgtgtcgaccttgatcttcgattcctgcacctgacaggccggctggtggttttatgataagaatgggattgcattctgtgagcatttcttgtatttttgttctttgaagactgattcttgcgacttgttttggtctatctttctcagctttggtgtttccgaaaggcgttgcgaggagtatttgcttttcttcattcggtttctttgggcccgatgaaattggaactagctgcacacttgcagagcaggacttgcatgtcacgtcggcctttctgatacgtcctttgaatacagtttgacggtttatctctctcccgcgtagcatcaaccatctttcggagtatatagtctgcttggaatggtagctataattccgttgtatccacaaatccgtacaacatactcctatgagaagaggagccagctccatctatatcccattttggcattttcagtggagatcaaccactgtagtgtatcagccccaccaggtgattcgcacagaagcccgaaactggagaaattagtccatagatttctttttaactcattcggatccgtctgcaatctgatcgttcgatgttgaagaaatttgacttggaaaatatccactattattacagctgactgtgaattccgccaccaaattccaaagtaggttgctgctctcatacttcgatcctctgtgaaagattgagatctgactattgttagaatgactcctgctccctcggattctggtatgatgcaggcggtcgtgtttcacgggccctacaaggtcgccgttgagcagaggcctattcccaaggttcaggacccggaggatgttatagtcaaggttggatatactgcgctttgtggaaggtgggattgatctatacttttcttgcgaaaaggcccatgctaattttcgtaatattctacagtgagctgcacatgttccgtggcgtggagcctgcaggaaaagatttcataatgggacatgaatttgtcggtaccattgtggaaatgggcagcgctgtcaagactctacagaagggtgaccgggttgtgactgcattcactacttcctggtaggttgtatgctcattatatgctggttctatattgcaattgtacgaatgttgcgctgacaccatgatagtggcgaatgcttctactgcaagcaagggtggtcttctcgctgtgataagaacagtctttttggatgtgacagcttggacggtggacaggctgaatacgtgagtttctaagcatgttatagctttgctctatatgctgatattaacaggcccgcatcccgaatgcggaaggttccgtcatgaaggcccccgagggcgttgacgagaaatatctggtgctcatgggagatattttccccacgggctggtttgcagcaaacaatgcattcaagaactcaaccccgcagcaaattgctgaacagacagtagtcctaattggatgtgggcctgtcggtctctgtgcgctcatcaatgctctggagtacaagcccaagcatattctggcggttgactcggttccgtcgagactggagcttgccaagtcgcttggtgccgagccgtggaacttccaactggaccgggctggtctagacaagcgtgttcaggagttgacaaatggacgtggtgccgatgctgtcattgaagtcgtcgggttgagccctgcattgcgcactggctttgaactgttgcggccttggggaactattagtagtgtgggtgtccacaatggagaggtaagtaggtctgtattggttctagtgttattgctaatgaacgcagatcccgtgggacggcaatgatgcctattccaagaacctcactgtccaaatggggcgatgccctgttcggtctgttgctcctcgggctcttgaggtgctcaagaggaaccaacataagcttgggtgagtccatggtatagttatatgactgatatattggtgctgacaaagaacttttagcttcatgacagataagatcatgccgctctcgcaggcagtggagggctataagctatttgaagcgcaccaggtgcagaaagtgatattccaggctgataagtagagaagatgtagacagaaccaggtaatatagaatagaaagaagagtagaatatagaaagatgaagctgaagtcccccaaaaaaaaaaaggcagattttcatactcgggttctctccgcttaaagcaaaacaccaccactccaacttcttcaactctttcacatctccatcttcctcaccttcgtcccttttcttcttcctctcctcttctccttctcctcttctccctttctcccatcgactgcttttcctgttcaccttcttctccccctctcttgatccgagattctgccgctttcccctcccatccatttctccacttcctatctccctcttctgtgagtcctcactctttctagcagttggatcctattcacggactccctcacctgagaatttgcgcatagctacatatggcatgcgcacttctctttgtctcaattaccaaactgactttgccactatttgggtgtgaagtctctaccgtcccgcgaccgtacggtcttcaagaaaccttctatcccgccattcacttgaccttttcaaatcgctcaatcgctcctcctacctccatcgattatcgataaaaatggattccactgagattcaccaaactactgtcgtggacgagcccatgaccgataacttcaacgacaacctcgctgagcagggtgacctagaggcccccctcaagaccgaggaggagtatgctatcgctgagctgactctgcgtgctattgtctcctccaaggaggccggtgttatcatcggcaaggctggtaagaacgttgccgacctccgcgatgagactggtgtcaaagccggtgtgagcaaggtagttcccggtgtccatgaccgtgtcctgaccattactggtcaattgcgctcgcttgctcgcgcctatgcgatcgtggccaagggtcttttggagggtgccccgcagatgggcatgggtggtattgtctctaacaatgggacccaccgtaagtgatatcttttttttattgcccctcaatattttggacttggactggttatgctgttcggggaattaaagcaacccatacagagagtctggaaatccccattttgatctgagcttgttctaactctctccagccgttcgccttctaatctcccacaaccaaatgggtaccatcattggacgacagggcctgaagatcaagcacattcaggatgcatcgggtgttcgtatggtcgcgcaaaaggaaatgcttccccaatccacagagcgcattgtcgaggtccagggtacccccgagggcatcgagaaggctatctgggaaatcggcaaatgtctgcttgacgactggcaacgtggcaccggcactgttctctacaaccccgccgtgcgcgcttccctcagcgcctcgcagccactcaacaacaacccccctgctggaaatggctaccagggcaacaacaacaacagccgccagtacaaccgcaccggcaacggcgccgacttcagcgatggtggctataaccgccgatccaactcggatgctggaaaccgcggctaccccctagttacggaagatggcgaagagatccagacccagaacatcagcattcccgcggacatggttggatgcatcatcggccggggcggaaccaagatcacagagattcgccgaagctctggcgctcggatttcgatcgccaaggctcctcatgacgagaccggcgagcgcatgttcaccatcatgggaagtgctcaggccaatgaaaaggccctataccttctatacgagaacctggaagccgagaagactcgccgcagccagcttccccaggagtaaatcctgcgggatcatctctggtgttttgtgtgcggatgagacggtcctagcaggactcctttgtgttctctgaccttacgacttccttgaagacttgtcggtcacgatcagcggcggtcatgtgctagcgcttcttttatttcttttttattttctatttcattccaattgcttttctctgttgatcttcttcctcggctatcttttgaggttctagcctcgtcacacgtcgctttattcacaaaaaagacaaaagttcactgcgatggatggagggaatacatgcgtattagataccaagtttgtgtggtctttatcgaccattgtgcgttgaattgcatcgcgacccggctgtctctcgatcctatctctcaactttgtcaattacaacagcctcacacctccattccctccctcgcttcccccattcagctgaactgtcaccgcgatgtccctaatctctctttacaccttaccccgactcctgaaccacagacctctccgccactatcccggtccctacctccaccttgtccttctcatcgttccgccttgtacgtcgccaattcgctggcggggtatattgatccttgtctttcctctactcttatctcctcgacttctgtaccctgttctcgttcccttcctatccctgacttactgcaatgctaccaccttttaccaaccctcgaaaacgaaacctctaaataataaaaaaacgctcctcgtctcctaattacccttctttcatgtgcctcctcgctgcgtaccaccttggctcaagtatgaatatatggtgttgaatgtcaataggacattgccattatctgaatctcaagaaatatccagaaagacacctatatcctcctacattgtattatatttagaaagcaatagaattaatcaaaaagctcttgaatatcatttcattccattcaatcgttatgtaaatgttcgttgcgactcaggacaacaaaagaaacaagagaaaagacctgcgggcaacagacttagatacaaaaacgtgcccgcaagaaatgagagacgtgacaaaagaataaacagggaaaagaaaaagaaaaacaaggaacggtaaaccctagcgtgggatacacacatggaacagtgtgccacccggtagagtattatggacaagagacgccgccaatggtaggtttgtacatgaaatggcaagccaccggtagacatgatgatagtccacggtggtgagatggtgtttttgctgtcaggggtatttcccgcagacaaagatcacacagagaaatgtggacatttaatagaatgtgtaatgtgctggcagcgtgatgggaaaatacagaggagattcgtgggaatgcatagcgaaattttgtgaaccgtgcataggagggaaaacttcgaactgccgtggctgctgagacatgcataacaggcaaagtccgttcaaaagatggaatgaatgccgatgtcgaagcatatgtccaaagaaactcgctgcgtaagtgacgtaaccggatattttgacggttggcatgcatgatagtggggttcagccagaggatatcagagatttggacgttaatcgatgctgtcatcgaggtttgcattattgggggtagccggagcacgatttcgaagaccgaatcttcgggcccccaagctgttcgttcgcagtcgtggtgtttggattggtgtgtagctggttgccactttgcttgatggggtcgaaatcctggtctgggagggttccatttggagtgatcgcggactctcttcggctgaagatccctggacgttattggaagagaagctgggcgttaggccgtaacggcgagacccagcctggatgttggagcgggatatcgcaggagtgtacgtagcagggttcatgtagcttcggcggaatgagaaactcgacgagagagtcggtgtccgaggctgggatgactgcacctgcggctgggggaggtgggatggttgttggtattggtgtgatggttggtattgtggggagcgaggggagtatccgaagccgttatgttcctgctgcgcaccggaaatggagcgggacacagtgtgaccttgggagaatcgttgccgaggagggggtatggcttgcgcaggaagcgatgtgcgtatttctgtattgactctggaactcgaacgactatgtgaacttccggtctctccgttctcctcgccaatggtcagcctgcggctgcggagggaacttggcatgcgattgagacgactggctgggctagacatgccgggagattgtgttggactctgcttgatatcgttcgtgtttccagggctggcattgaccacggatgatcgacgtgcttcaaggcgactggacatgcgattcgtactatggcgccgctcaactccttcaggctcttggttcccgtttcgctgatacgttggtatggacatacgagcatcggctcctgcaccattcgataattggggctgcacgactgtctctcggctcgaggacggtcgggcactctttaactgctcatccgtcaaggctaggcagagctcggtcaggctacgacatacactgtccgctttgcggcgggcatgtcgttcgggcgaggagtatcctccattcacaacagagacactgcctgacggagcggtattgacgcctaacgcggtggaaaggttcaaagcatcggttatcgtcgcttcgaggcaggtgtacacttcaccgctcaaaacagcttttgccttggccaatgcggattgcaggatcggatgcgccgggttatgttcaatatctgcagctgagatgctggttttgcggcgttgctttggtgaggaggataaggtggtaatggtagtgtttgcagtccgcggtctctcgttcgtaggggtgtacatcgccgccgaagatgatgcgggcagtttgcctgtcagttccagcttcttgatgcgatctttgagatcatccaattcgtcccagacggtcgatggggccgtgatagacaacgtcgactcgcttccatcagcgcgcgatcgttctgtatcggctcgcggtcgcccgatcacttcggagtttgaagtttgccggctgcttcggattgtagagagccccgaatggcgattgatgcgcggatcattgagagaggaccgacgctccagctcctcagcagcagacggtgtgcgcggtgaagtttctgggctcgtgcggctgaagcggctgcgcggaacaccgacggcggatcgcgcactggatagggtactgtatcggaagcgagcagggtcgtctagaggatgggcggatgacgctagagtatgggtggcgctgtagggagcagtaggggaatcattctggaaatgcaaggggttgtcgagattgctataccgctgatcgggtgagggggtttgttctgtcgttggcgaccgtagactttggctagaataacccagccgtgactattatgttctcgttagccatcgggcagtcgcaagaaggggtcacgcggatagcacaaaagcgattcggaatgcgatcggctcaagacctgtttccttctcacttacccgtctgaaatctgagcgtcctatggagtcgcgccgaccggaatcggttctcgcaatattcagaaacacatcctcgttctttgggcggccctcgtcccccgaggacttgtcctcggccccccgatgagtaccgttgagactgccattgtgagagcgattattctcatttagggttctggtcgctccagaataagccagacttgatggcattgctcttttcacatcagggcgatcttggtgtaattcgtcctgtctgcgcctctttgaagcatagggagattcagaagcttgggggctgggtgagctgaagcttaagacggatcgtcgggcgcggtgcaataaggagcgtttggtggttagatcgggcgtttcatcagtggggccatggaagcgagtgtgcaacgacaaagaacgcgagagaggaaaatgtcggggaggttgggagtgctggtcatggtcatggccagaacgctgattgacctggttgggtcgcaaatggtcacgggaacccgcagtcatcgtgtacctgtacggagtacggagtacaacatacagagtacgatgaagtactgagtaccgtttgaggtgttcctacctcgcctgacaattctggggaaagctgggatggtatagttctgatggattggaaatatgcacaagccctagtcactgcagaatgtcagtaaggacttgaggacttgacctgtcagaaaatattgcgggtatatacttagtagtgtgggaaaatttcaatattgacaagctttttatttctattgattgggtttaaaacttggggtatccttttgacttgtgcatatgaaagttgatagaatttgacgtgaatgacctctatagacggggtatggacgatgctacctatatctatgtaacgatgtagatgctgtagtcgaatggcctacctcaaacccaaacatcaggaagaaggaaccgaacaaccagaacggaaaaaagaacggaaaagaaaaaatcaaaacaaacagggcaggaaccatggttcctctcagtcaggatccatggttactttgaaaccacccaaattgaattcgactgacaggttttaaaacgaaccaggtacgattcgatgtagttcactctatagaccctcgaggatgctagccaatggtctgtctaggccttcattggactatatctacaatataggcatgcccggatgtgctgcttcaattccaagatgcacaaatgtaaagtgggcagcttgggttaggaaaagtacttggcgcaagttgttttgctgttaattaacctgcttaatgctcaattaagtaatgaagtagtgtggcactgcctcaaccgtggaaggctagttagttatagctgcttttcttgagaaactgggctactagttaactacttaaatagagaaaataagcaaggctatgccaataaaggggtttattcagtgatctatatccttgcacggagtatacctgatctcgctactatcatttaatctggaatcctacggaacgcttggtcgaatgagatccatgtagcaatataagccgaatccttcgacgtctgggcactgccactcagcttagcctactatcgcgtgacaaatccattgtcgtgcatattgtggcaaacctcaacgttcaatacagagtagaccaatccggtattttgtttatattaatcattcaaccgaaatctatttgtggaataatccggagaactcgatatattgcaacggctagccgtaaccatatgttgcagtgctatttgcaatctgtaccccgtacctgtgtcagtaataagacaagaccaagagttcactagtagtcgaattgaacaagctgttctctactccgtactctatgcgacaaaccaatgtgtcaagtccgaaacacaaaagcatacgttataaacagctcatgtgcgattcaggacgtttatttttagaagccagtgaaacacgctcccttaggatcactacaccaaaaggggctcatctatctggaactcttctggcccaaaccagatgttttatagaatgatgtatgggaatatcttctccagactcggtatatcgccaaccgaagatccagtttcaggatcgttacgagaacccacgtggaaaaggccgatcattcgtcattcgaaaccaagtgggcctcaagcttcaataactctcctcagcctccatgggaataaacctggatgatgtaatgtagaatgtatattccgtgaaatcaaattccaaccgaattgactctgtttatatatatatatatatatatatatattctacgtacttcatagactatctagagacaagtaactgccaagacctgctagtcacccactagtgtcagtttggcgtgtttcagacagcgccaaaccagatccatggggtttcaggttgtgccttgtcctctcgatctccaccaatcagatccccctcagttcctatttagggactgccaatggtatgcccacaccatccatgggtcagccagcccaccgttcagccagaccgtgtgaatgattgaatgcaggtggacttgatagcgaactcatacgactgagaaactacatatagtcgaaccgataatagtggggtgatcgaggggaatttggaattcaccaaatcaactccctttcgggtcactacgcaccagcacatctccaccatatcccgtctcaatgtctcccccttgtcatctcggtcctgagccgtttggtaccatgtgtaacagatagtgagagcacgggaattgtcaatcttatccaactttaacagaacatactcggacgtatgtgggtattacatgtattttcctggaggttccaaaggccgaaagactattatctcacctgtaacatcatcgataatatacactaaggcaggtgatggcacacctgtagcctctcatcgtcggcggtttgacgcctgaacattccagggcggctaaatatagagcacggcgcagtgattggtgttgctctctccaactctctggatcccctctttttcgtgtattgtatgttacaggtgaaaatcgatctctaaataaaaccacaaagggtccaaaacccgtatactctcatttttctttctttcctttttctctttctacatcgattctgctttctctttcatcctctctccagttccctggaggaacccgcttggattctacattcatcgcctatattgtgatacattcgattacttctttgatctgagtcttggatctttcattccttcatcttccttggaaaatacacatacccttgtgatctggtatgtggatggccttcctatccaacctcttcattatactcgatctcgtgtggatgcctttccccttgtgatttgcatgatcggatcattagtcgcaaaacccttgcatttcagctgccctagattgaagctaaacgcccattcctcccccatagagatcccatttgcgcaggaagcaagtgcatcttcgataccccgaatgccaatctagcctcttctgagagccggattgaaaaaaaaaagaaacttttcctttcatactaccactcggacaatgccagtacaaactagccagtcctttccggacgcatttccttcttttatgtcggtgtttggtggtccccttccgcgatacaaagaagaagcaaacactatccaccctctacaatacccaacccatgtccctgtcaatacacgtctacttccttccccccaccgcgaaagtgtttcatctgtgacctcggcatctacggagtcctccccgaccaccaccatctcgccctttgattcgcccggcgggggtgacgtctctccgagctcgtccccggaatctccgtctgcgatgtccgtcgcatacccaaagttcatgccttcctcacggcccgtggaacttgcgtcgcgccttgcgcctgtttgcgaaccgcgcctgtcgccaccgaactctcataatacgcgccccgactccccaaatcggcgggcgcgcaatctcaagaacctgtcattgcgaatgccacctccatctcaggctcccccacccatcgctacttcgtcggtggtggagaccacgtcaaaacaccatttcgatgccccgctctctcccatcatcccgatcccttccaataacaagagcgcgaggcgacgcgccgccaatcttaccatccagacccccactttcaataaacccttatccggtatcgccaccgatgccgtgccgccaactccatccctacgtcatgcagaatcctcaccttcgcttgcatcgattacatcgccttcgttcgcaccccggggaggtatgaagcttccccggttaatgtcacatggtgcgcgccggttttctagtgaccctcccgatgatgctacgtcccctgtcaccctgaagccgattgatggatctggcttctcgcatcgagttcttgatggcctggaagaggaggatgaccacctcgactcgcgcgagtcgacccgcaagaaggatcgtggctacccggatgggcctatccggatccacgactctggcgtctacctgtatcttgaaccgacagcagaagaagcggccaaattcgatgtcgtgatcaacgtcgccaaagaagtggcgaacccgttcaatactagcaaggatgagcggagtgatacagtgatgagcgcatggcgaaacacctccatgtcctcgaaacgcttctcctgcagcgagccccagaccgcgatttcagaaatgtccttcaagtctgcctgggaattccagcccttggattccgagacggcaatccctactatttccacccctgcaaattccgtaccggagtacctccatgtcggttgggaccacaactccgaaattcttgaagacctcctcccgctctgtgagctgattgacgaccggatcgcggacggaaagaaagttctcgtgcattgccagctcggcgctagccgctcggcatcgctagtgattgcctacggattgtataaaaaccgacacttggatttcaactcgatgtacgaagcagtcaagggacgcagcaagtgggttggcccgaacatgagtctcatctaccagctcacagacttccgctctaaattgttgcggggatctacctctaagcccccgccccaggaatggttcgtccaaaccggccgacgaagctcagagcctcaggttgcacgagctgagcgctcagcgtccaatgaatcaaggccacccttccgtgggctgtcacagacaccttcagtcagttgcctctcaattccagaaacgagatcgatgcgtcccaatacaagcgacgacggtacctacacaaagttcaaatcctactctcccaagcggagtctgtccccccgacccctcccattccgacagaagttccagtccgtgggacctgcatttggccggcgagggttaccgcgtagcgtcagcagctgtgacccgctcgttcagagccatgtgtttctacgcgatgcgccagactccagcgatgatttgttttcgccgaggacaagcgcattcctctcgccaactcctttagcaccaccatcatttcaccggattgatcgctcaccttccatcccttacgccatagggtttgccaccgaaccggcagaccctcgctcgcctccatctagcggcgagcccctgatcatgagatctattgatgaattcttgtgatctccgcctttgtcctttgatacaggcctgaaacgattccacgacccgacatattttccatgtctctttcctgattgaagaccatctgaccaacccggggtcccgggtcgatgcaacccttctattctcttattaatttcttccactcatctaaatcagatgactggcttgatgatattcatgaccaaagcaggctttgctgtcgctcatcgccatttttcccaacttgcatacttactgcatatttctttttgtcatttggacctacgggtcttttcaacgccattactggtcatcatcgctcgaacttattctttcttttaccactggcgtcttgggtgtccaaaacggacaaatatgataccaaggccaggttctgaaaggttgaaacagacctgtctgcttcctttcggcctggtacctgtaatattatcggagggtcctatctctttggggtttctcttacctcccttggctttcgtctcactttcgcttgattgtctcgtgtcactctcctgtttttccatcttgtcaggcaagggatttgcttctgcacctttagtgtcagcattcgtgctgaagcttcgacccttgaaactcacggtatgctgggattatgggtgaaatatggcgtgataaataccccacttgcacattctcacaatagagatcgacgttaagcttgaattatttctcgtaaagctgtaaacatggaatccagtctagttagtttgtggctggctgttatattagaacggagatagcgataagctccgagaacctctccagagctccatcccaaattttccttgcgcattcctctccacgctcgcgacaatggctgaagaatcccatccggcatacctctcacccagcgagctaggcacaaaagactagtatgtgtccttttcagccacacttccttcctttgctggacgggactccatgaaccccgctctacccctccacgaaagctgtatacatcaattgagccaccaattgatctaaagactgcatctgctatctaaaccaattctcaatcccaaactaacaaccccaacctagctgggaatcctactacgcccgcaccctagcgcacatctcacacgaagctccaaagaacaaccccaatgccaacccggaccaaaacgacgacgatgccgcatccaccacctccgacctaaacgaagaagacgaccccggcacatcctggttctccgaacacaatgccccgcaaaaagttctccgcttcctcacgcgcaagtccttccccctatcgccgcgcaatacagcgcacaagaaaggcgcccgccagccaagcgttctggatctgggcacggggaatgggagtatgcttgcgctgcttaggaagaggggtgggtatattgggcgtcttgttggcgttgattactcgcgccagagtgttgagcttgcgagggagttgcagcgtgtgagagggcattcggcttatcggagtgactctgaggatgaggatgaatctgaatctgatgatgaagaggaagaagaagcagaggctgaggctgaggaagatactggatctaaggacttgccgggacaagatacatccatccagttcgaggaatgggatatcctcggctcgaaggctgttctttctgagacgggtctcgaggtatcaccctcgtcctcgtctccctcggaggaaacacttccctggtttccatacgatcaaggcggctttgatatcgttctcgataaggggacgttcgatgctgtttcgcttgctgatgatgcgaagactacccgtgtctgtgagaggtaccctgatatcgcgcggcacttagtgcggcgcggtgggttcttgattgttactacctgcaactggactgaggaagagctggtgcactggttcactggtgagcggacgagtggggatcggttggtggtttggggccgtgttgagtatcctcggttccggtttggaggacatgagggccagggggtttgtacggtgtgtttccagaggcttggggacgcttgatatttgagcagacctgcggattaccatgcgaactataccctaagcagaaaaaaggtggagtgcagatagctagtatagcgatatgctgaatatagtactgaaacatttcaatcattcactatagactattgtatactcatctattctgagttcgtagtatcatcatgcaaggggagagatatcgctcaaaatgcacccaagaccatcatcagaaccaaaccaacgactctactcccctctcctcttgagaacagcaataacacaccacctcctctgattctccgtgccctccccttccctaatcggagcccactccctgcgaatctcaccgtcatcctccgaccttgcaatcaaatccctctcatagatcctctcaatcacaaagccattctcaagcgccgtctcaaagaacccggcaacaatcgcccgaccagtatggaacccagaaacgacccacaccttcccaccgggcgaaaggaaccactgcatcgtgcgcacaaggttctcatgctgcgcgcgcatccagtaacaatccgccgccacgattcgcgtaaaggcacctttgttcgccgtcgagaaggagtcatccaacaaaccccattggtgcgggtacactgatactgctttcacgaccgtaggcgagcgtctggccaggttgtactcaacattgaaagcgattgcgccgctgagcgcaggcgaggaggggtggtcggttgccacgaccctcgaggcgttggctagggcacagacgacggatgggagggcggcgcctgtaagtaatatgaatgcgttagtttggtttgggttagggggttgaagaggatgtatagcatcaacggccagtggccacttaccagcgcctagttccagcacactctcccccttgatcctccacaactcccggttctctctctgggcttctgtctcggtctcgcctggtgcggtgggtgtgtctgcttcctccacggccccggccacgaccattgctgcgctccagaggaaatgcgcgaagagcctgcgtccctcgtcgacttggttcacggagctgtctgcctcgggccgttgctggcttgagcttgggtagctggggaccatgatgttgaggtcgccataccgcggggagctgtagaggaggtgttggcctgggtcgccgtggaaggaaggtgcgtcgtctggaaagagatgggggaggaatgtaccgaagagatcttcgggtgattcatcaaattcgcagtcggcgtcctcgttttggaattctggtgccggggcactggttgtgggtgtgctaggatgatgatggcgggggaggggccgtaaacgggaatgaagcattgttgtggtttgtgagggattttcgatttattgtttagtgaaattgagtggtctggtatgcaccgaggagaaccaagatttgtctggttgaaaaagtcaattgacctattatcagaggccgttgtgatccattccgagggatgcccaatctttaatttcttatctattgttgcgataagggcttgacgaaggtgtttgcattgtttgacggattagcctttcagccctggaggtccgaccacgtcatgccaacactggcgagtattatggagcatacggagtacaccttgtgagggtcacgggttgaaaggttgtctagttaaacccattgagaacaattcccacagctatagtagctcccgatagctctaataattagatcgacaccgacccaacttcctaacccaataatacggacaagaagaatgtcccgagtgtctcagccgcaggttaagaatggcgggccaggcaccttgggaatgtgccagaaacaggaaagatcaaggggcttcctactcctaagggcgccaaaaataatcccaagtgctcgtgcgcaagaaggcgtgacggtcggagtaatgatcctctcctgtaggcgttagcgcgcgagatggcgcgacctgatcgtagcaatgtggtgacctgagcgattacctaactgacacatgtcttccggggcccgggtgcctctagtgccggcttagtgataagccacgattcatctttgccacaaagatatttttaagtcgcacatgtactccatagttacagggcaacgacctagataggtatatgaattaagtgtatcggggtgtcgttaactacgccgtaattagttagcgaggtcgtagttaactaccttagttaatatctatcaggtgatgcgactgactaaggcctcatgacatcattgggcccaccccatccactcttccaagtactagaccggtcgatgctatgcaggtgatcgatacatggcaaaccggtcgtttccaagtcactgcactgcttgcggccatctcctatcaatacacattcgtcattgcccgggcgggaacccagtgacctgattggtacttgaatcaggagtccaactgtgccatcttgtgaccctagttgatcgtcaggcaactggcttttttttttttatatgtgttctttctattcggctatgtggcatacctccatatattaaagtactccgtatataatcttggaatagaattggaatgattttatatccaaagcctagacccatggcactatccttcagaaccagggcgcagacccttcccctgtacggaacgctatccgagcagggcccgatgttcaaagattacatatttcatattacatatttaacaagattatgcccaacatttgccatctcgaattcaccgggttgatactacaacgtacgtactctgaacatgtctttattcggataggtggatccactatgctatcgccatcacaggcattgcgaacacgcacagagacaacacacaatatagggcatatttaggggcatataatagactaataccacattatcgacaataatatagccctcccgtatagatatcttcgaatatattagcaataaaatacccaaactcgtatgtgtgaccggtgatcgctgcccccccgcatgctcaaagggaaaggcccccgcaaacctgagcgattttggctcataccggccctgactctttctctccttctttctcctcttttttttttcccttccacctttctttttttggatcacctcaccttttttctttattcgctctcattctctctcttcatatcatcttattctcgcattcattgctctcctctacctatacatcttcgacccggaattcggccccatttcaccctcacggaattgagggcagctcgtgttcaggaggattgtcaattccattggaagcttcctctcatttcttaccatggcctcgttcaaggtatgtatccagcatttctgccgcacatcttttttttaaagggggggccatactaatgtaccggcttctttttggccctgcacaggaattatccatgtcgcgtcctctccccaataccagccagcggcatcacacgcattccatctcgctcggtgccctcaatccaaaccaccgtgtaactcgccgaaagagcgttaccaccgctgccgccaatgctgccgcagtcgctgcctccatggagggcggggaggctacctcgctccccatgggtgcgcaccgccgcgccctaggaggccgcaagggactggagtccggttccatcggaaacgtatctggcttcagctcctacctctcccgcagcatcaacagctccaagcaggaatcatcggtcgcccgcaaaagttctccgggatcagacaactccgatggcaagcccgatgaccggaaccgccgagccagcgagggtgcccaactcaagaccgaagggaagcgtgcttcgacggccatacgttgcgatcgctgcgggaaagggtataagcatggcagctgcttgtccaagcatatgtgtgtatcccccctaccgctcggccgtcttcttctagctcgatcgggaatatgcaccatgtcggctctgtgcaggtcgccctcgtggttattcaacttcccttcatcactgcccccccttttttttcccatccctttcagcaacatttaattgaccaatttttttttttcgtggtatcttaggtgggaacacgacccagcatggtccgttacttcgaagcttctcatctccaagcatcagcaggttcaactgctggaggccgcctccgttttggtcaccatgaaccacgatgatccacccgatgagtccgccgagttggagtcggaattgtcgtctggatcgccgggcgccctgtcagaaatgcaggatggaatcagttcggctgagaccaccccacccccaatggactcggaggaagatgacgatttcgagatgtcgggtgtgccggcacagtggaccaaacgccccagcatcagcaacgcatccggtttctctcgttcctaccagtccattccgtccagctcgtacaacgagagtgctccgctgcactcgcctaccttctcccacttccgccactcgagcatcgacacccgtccctcaactgcggacacacggttacacgaggatgacgaggcggatcttgccgcggccatcggcctgtgcaatttcggcactcctcgcacggggcctctttccatgacccgcgacgtgccaccagtgcccccattgccggcgcgttacttggactcaagcagccacccgagcaaccagggtctctactcccctcaattgcgccctacagaagaggccgctcgccgagactccgaggccaacatcttcttctcccggtcgctcaacccgtcgctgtcgtacaaggtgtcggatgagcgtgaggtccggactactggtggtgatgaggaccaacaatcccgtcaacgtcgcaacgccgatgtggactttggtaaccgctccgcgccggccgacgatgacgatggcggtgtctttggccacatggaagagtaaatcccccagtactctccgcgccttcgcgtgggtcaaatcggcgtatgccgaacgatgaccccttcacgatctcatgtacgagcttgagcgaattttttgaaccttcttgtttacatgtttccaacctctccggatggagaatagagccgatgtccaataatcggtcagagctcttttctcaacggggtgtttcacaattctcgggaccttttttcaccaccttttgagatcccatgtatcaatcatgtctccttggtccgctttgttttctttatgttttgtcttgccacggcttattctggagacccctttaaacggcatactccgcatggccggcgcagattaccatccccatcaaatatttatatccatagggacgtgacataccactttcatgccctctatgcttctcgtttgtcttttcccctgttctgtttctctcacctcgcacatatataccaaacccacaaattctacgatccgctcccctacttttcccacatgtgcatctcgtccgttcttttctctctccgtctccttgcccatcctcttctatctctcgcctatggtctctgactcttgtgtacccaattgaccctcggacggggcatacaatgaatatatttcatgaacgtatactattctataatgtagatctacctgtcatttccgcatctgtccctgtgcctgtacatcataagcggggaatcaaaagacccactaaagggtacagttccatatttttgtcgaatctattttcgtcataggggaagacgtcgagtgcattcgagaacagaaagaaagaataccccctatagagtagttatttttgatcaaatacacagactaggccgtggggattacgcgagcttcgtggaattagcatgattgcaggtcgtgtgaccccaggatttatcactctctgaagagcagttacctcgctagcttccaatcccctaacactcatttctttagtcaagaccctccgcggccgacatgctcctgcatagcatcgtccttgttgccatttttaacgtgcccccatccgaaaatgttcgattttatcgccgcagtggacgtcgtttctcgacagaatctcgcgccaatatcgccacctacgactatcagattaggtttcctcatacgatgcagctaggattggtatagtcgcaatgcctcagaatttaggcataatgctcatatgagagttcgctttgaaagatagcatcgattctagtgatcagtacagataccctctctaagaacagtctatctattgcatacagatctattggcttggacactttgggaatttacgagagcgcagaacttcttcgacaactcccccatgtgaccgaagatgtggacattcgctcaaatagtaccacttaagcccatgtataggatggtattttctgtcgctagattcgggtgaaccaagtctgctaccgccagatccttgtgagcatcaatcagagatgatgagttacaaacaatcagaagccagtcattgacaggacctttgagtggcttccataagctgccggcaacgacaatgagcgctggaatcatcgaatacaaaaggtgtaggagtatcttacttgatccactggaagctaatctagactagatctgcctctttcccatctggccccgtatctcatctatcgttccttcacggcttgtgtctaggtttaggtttgagagactgcgctgagcgacaacacacatagcggtgcaatcttacctacatgagccactgtggctggctgatcatgctcatttccatctgatattggatatacagggtgcggttctcgtatctagaaaagcttgttagaaaccgaggtaggggagaaattgtacaccgtgacgaaaaacttccacccgactggcacggagatggacactctctccgtcaaacgaaggtactttgtgacctcttctacccgagaaaatcgctgtactggagaaccgtgttgaatagtaaagccattgcgctcgagctgaaactggtcttcctgtccccgaatttcctcgccaggaataccgtcaattgtctgatgagtcatgttggtctgaaggcagccattgtgggtgggaatttgaatgaatagggccgctgttgccggtacaatctgtccggcttgagaaagaacaggctgggatgaactgtcgaaaaaagattcatccatcggcatgatcattctttgcttatttgattcagtcgtagtgtgaatcgagagcaaggaaagcttcaaatctgatgtatcaacaagctcttttgctgaacctgagccattccaggctaccggcagattctctgcttatagcgcgacctgtacgctgtcggttcccgactcgcaggaagtcgatgcaagaatccctgtcccatcatcatcattacgtggctccacaaaagcccctgctttctctacaataacaccgttcattacgggatcactcaaacttttccgcttggtcatatctatcatctactggatgtgggcagggcaggggactcagccatctacgggtgtataacaagcttgagataaacctcttgcttcgtcgcaagttcaagccacatgtgtgtgatagtgattgtatatgcatggatatcaccccaaataagcgcccaggacgccacggctcaaaattcagtttgattgtcgtccaccaaatcagcctagtatacttactacatgctgtgattggttattctactgccactagatgtgcctctcaccctattatgcggatactaacatctcgacacacgtagctgtctataattggccatatcatcaccccaacaaatcaagtgccgaacaaaggatgtgattgatggccaacggcgtttaaaattgcagggtctgattggtgatagtccccacatcattccatctattccggggggaatggtacttttcgagagttttgtttggcccctgaccacgtatttattcgagtgtttctcctcaaaaaaaaactcttcgacaagttctgtgaaatcccctattgaacaatcaaggacgacacatatcaaacggtatgtacgtttggcatcaactcatagacaaccctatctctaacatgagtgttgtagatttatcaacatgagctctctccaatgccatcttgacattaccaatgagcctggctcagaagatgagacaggcgaatctgtcacttccgaaggccaggttgagcaggaagccactcatttgcgaccctggaatggcttctggccacgccctcttaccgttctgaagccgggcggcatcatcccgattcagggcaactaaagagagtggttttagagtttaagggatgcgaaacacctctgagcagcggcagtaatctggagattttgtcgttggcgctatcagatcagtcattacagaatgagatgtttatccttgtcaatgatgcatgcattgtattccaatcgaagtgcatcctataaaagccaatgactcttcaatatgatttgcctcgaatttcatgaaaacattctccgacctgtttgacttcacaaggtctgcccaagggaatcaagtcatgagtaagacgaatctggaaagccccatttgccatcgcgggtcagcgtcttccccatgttgcggttgcataaatgtcaaccaacacgagcctctggcgttgttgtatcggaggtacgttggaacgtagtcaaaggccccattcaaatcatcatctggttggaatatattgtcgacatgtagccaggcctgaacttggtctcacagtggcactcaaccgaaaaaacagtggcgagggagggaatagtggctggtgggtcgaactatgctccatgaattagttcaaagccctatgattctatggtatcatagacagacctccaactctggcagtgcgaggaagttgttgtttagttgaaaggtgtgatcctcaaacactgggacaggtgccatggcggaagtgccttactataaagttactagttaatgactgtaatgtcgtctattgcaaataattcttcttgatctgttctaatggaatattccaaggtcaaaggaagtcagttctccgggttacgggctggcccgtatctcccccactacactacgcatgactgggcatccacgtggttggtataagcctttgcttttactaggcccactataactattagcagacctaatcgcctcattttattttttgggggtatcttagaccctaatatcgggctacagccattcacatataagacggttgcgtgcgttaggtgtgtccttgagcaatgagtataagttgttgaaccagttcattaagcagccaaggaattaaccaacacaataagtataagagagcaaaagcaagaaaaggcaacggggtattcacgctcgttctttgatcagcagcctccaccacagcctcctcctcctccacctcctcctcctccgcaaccaccgccgccaccactagatcctccgcagccgccaccggatccgcctgtatagaaaacatattaaaatctactgcaagtcgagattcataaagagactcaccacatcctccaccaccaccgcctcctgcgcagctacctgcggctacggcaccacctttggaaaaatcagtctcagtcaatacttctagaaaggtgacgaagcacttaccacacgtgccagagcaacaattcccagcggcacctacagtaacattcatgcaggcaggattacacgcgtatgaatcacagttgatggacgggtccatcatatatggtccatagtatggcaccataatggggtacccatatgcataaggcatgtagtatggataagcgtcaccctgctgattagaagctttggagccagatcgtttacggcgcttctcagcacgccgggcagccttctcgtagttgctctgtaggcgtaggtgttgcacagatttattccactcgacctgttggtacatgtttgttggccggacggcgttgtgtgaagagatgtgtgggttcttgtttgggtcggacgagatatcggggctatcgtgcaagaggtctgcagcggcttgggcccgagagactgagcgagcagtgatccaccggccatacaggtctggtgttcttgtcgcctcgcagtaccagcaggtacattcgctgtatatctcaccgtcggtgacacggcggtacattttgctagtccaggcaaagccgtccgagagttttccctcgtcgactttgtcgtcgtggtcgatgagcatacgaataccagcatattttccctttgacgtgctgtatttgtagtaccgcgatgggctgagttggtgggtgtgccatgccagatcaacatccagtgtgggcacggccatcttatctgggttgtcaatcataatctggaagaacacctcgtactttttaatcagccggtccatagtgttgaagactgtcggtgagtgcagccagtcgatttggtccattttctccacgaaggtgctttgtctgataacagcgcccacaaggtctagcgcgaagggaccgaggttatcccagtatcgagacatcattcttcggaattggatcttctcgccatacttgatacctttaaggtagacaccatgtgctttccacaaaagatttctgtcgcgaaacttcaactcaaatagctgcctcaagtggatgatattcagacaccgatccactcggccatcagtgaatgccatcaagtccgttttggcagcctgtactattcgtgtggggaatagcatgtcccggagtgcccgcggattgggtttgacagatgggcccccctcggggattccataaagattggtgaacgacccgggcatagggagatcttcgtaaatcgttgcttccaggtcttttcgaaactttgccaccttgagccggccatggtcgatcatgtggtcacaaccgacgcatttcgtctcgaatgaataatcggcgaagccattgctaaatttgaaggcattggcaacaagtcccccaaagcgagcttctgtccactggacagcgttcactcgtccgcagcaggggcagttgacttgcgtagtcggcgggtcgtgcagattattccacttgaagttcattttctgctcgaacagctgctgggcttgttcagaaactgtatactccatcgtttggttgttgatgcagctgtttatcgcttcccatggaaatcctgtggcccatgtgctcatcttaccgtatcgaatgcaatcctcaaggaagttccggggattcaacgaatgagcatgccagaccatcaaaatatctgtaaagtaattagtcaatcgtctttttgccttcaaatcaacacattacctatcgggggtagattttccgtgctccatgcaactatagtatcacaattaaggattctttcatagtcgatacactccaagtcattaatagttgccatcggtcttgaccgggggaggccaatagaccaccacttgatatatcgatcgactgcacgcgctgcatagacagcccagcgcttttcgcgaagacgagcccgcgcttcattcagtgaattcgggaagttttcagcttcagcatcgtagataccaaagatcccgtcatcactagagatggtatctcgcagatctgccagtacggccaaaaacttgagatgcgcaacacactggtcgcgagttacggtagttgaagaagatgggtgggaactcagatccagctggggcagttctaatggcggctgctgctcgacctggttggccgaataggaaggtggttgttcgctggaagatttgacttcagattgctggggtgcctctttggacactttatccgttgaaacacccatgttggcggttgatagagtaagtatgtcgtgagtgagtgtgttgagtcaagtctgagaggcggggtccggcggccctttatattagtttaatgatgaacacgtatctcattatccgaggacacccagataaagacaagtcggcatggcgctttgatcgaactcatgacctttcaaagcccctgaaacggacgaggtggactagatggacatagttacggacaacatgatggcaattgctactactaattggtctgaagtatcgaaagccttggctaagcctccacgaaatgtgaagatcgtggtaaattaacgagaccatcgtattcgtttatcatccgagccaataatccgagaacgttgtcttcaacttcataacggattggttcacgggcgtaatcgggcgcggttgcactgccttgctgccttggtggcttcgtatggagtagggcccaaggctgagtggagatgcgctgtacaacttacattatacattgtacacaagagtttctagtgtttttctagcgcccttttcatatgcttgtcctacgtacttgtggaattactctgtcctatgaaaagcgatatggataactctgacggctcatatccggtcacgtgctaggaagaccgagcccaggtcacgtggagaaaatgggagaatctccggtcaggtgatatgcccctccgagctgactcatcgatgttcccggaagaagtgcgctcaccgagtgggaacgagaaagttgagacggttttgttggagaaagacaagaaggaaaccggaataaccaaaccaaaaccaaactgcgcgtgtcaagaccaaaactttgtatctgcgaatccgtccgaatctctcccactgtctcaaaccgagatctcgatcagcaaaaacgtcattcagcctggcttctctcgggcgatcaaacggcatcggagagggccaggcccaaactcttgaaccgattacgaccattgataatgcttctattggcaccaatcccgtaatggcgggtgtaaatcagttgcctgtctcagttgccgccgatggcgtgcatggtcgcaaacgcaatatgaccattgcggggatcgatagttctccggggagtatcgaggatatggatgacaatgatgcgcgcgaggagaaaagacgtcagcccgtgaagcgcgcctgcaatgaatgtcgacaacaaaaagtaggtctagcgtattaccgcaaaagtcctccagcttgactaaccttttcggattggacagctccgatgcgatgtcatccaagacccttggaccgattgttcacgatgccgtcgactgaggctcgattgtaaaatcgagtctaacttcaagcgtgtcggaaagcgcagccgcaatgcagaaatggagagggaaataatggagctcaggaagcagattgctactggccaaccagtcccaggaatgtcacagcaacaagctttgaccgcaggacaattgacacccaagcaagaatcgagtcaagtcagtcccgcagtctaccaaacaccatcagctatgtccgcagatcagtacatgggatctcaagaagctgtagcatccctcctggaccttcgttcgggcttcgatggtaccaacttcatgaggaacggtggacaaattagacgaattgaggacgttatggttgttcccgagaaagtggcagaactgtttaatatgtgagtccccatctggcaagtctctgtgattgatctaacttcttcccgtcagattcttcacgtactaccaccctttccttccatttttggaccgaaatcagtcacccgatgattatcatagttcctcttcgttacttttctggacaattcttagtgtcggtgcgcgacgctatctaggcgattcgaatttgttgaattcccttgctggtcctgtcagccggctggtctggagcactctagcagatattcctcaaagctatcatgttgtgaaagctctcgctctactatgctcatggccgtttcctacaagcagcacctcaacggatccgaccttcatgctatgtggaatgatggtacaagttgctatgcagcttggtctccacaggccttctcacactcaagacttcagtaaattccgagtggaacttatcgaggatgaattgagagacaaggtgcgaacttgggcgatttgcaatattgttgctcaaaggtatgtaccaaaacctaatcaattgctgcttgtctttatctcatattttactgtgcagagtttccaccggctatgggcagccatcgtctactctttatgattggacattatcctccagcgattcgttagacccgaacttcaagcttcctgacgatataaggccaagattggagatcgaaaagttctgcgatagggtcactcaagcactttacacaaatcgacgcgatcctgttggcttaaccagcgaccacgaacgttcaacaatgattgcctttctatcgcgagactttgaggagttggaagaacagcttaaatcgcagaatgactgtaagcttccgaatttcaagtggggatatattagatgcatgactaacgacatataggtattactgacttgttcctccgtgctgctaacctccatttgcacctttcggcattctttgacgagccgaccactaaaaattaccgcgaacgcgtcttttctctgtatgtcgcgacgacatcattcctcgaagttgtcctaaacctcgagaccgaggttggcccggtcatctcttacaccccgtactatgtctaccagatgatggttgccgccggttgcactcttttaaaactgtgcaagagcttctttgcctctcacatagacatggaatacaccaagaacctattcaaccgtacaatatgggccatccgaggggtgtcagcatccagcaacgaccttcccgaacgacttgctgaagtgttagctcagatgtggagattgggaggagcgactcaaaggactaacaatagtaccgatgttgacgactccctgcgactcaaagttcgctgccggatgagcatgtccttgctttacgactctgtgtggcgttggcgagaggatgccaggactaagggccgaaacattgaaggtcagtactcctttagaatataagatataaatcagaagtcgctaacctttgattctagcctatctgaaaaatccaacaaatcctgactcagcggctgattcttcggccacttcatctgtcgggcctgtacacacatctgcaatggcaccaggaatctctgggaatgatccaagccttgccccggcacccctgctatcccaggctagccttgggatccaacaacctacaggtcaagcaaacggacttccaagcggcttcattgaacctaattacgaagtcttcgatccgttgaactggctgcttgatggcctggtagacttgccttactcacactccacgatggggggagtagaatcccagggcatcgtatagattggcctgctaatattttctcggcgttattgccggttttttttctattttttgcgggcgtggcttgcgttacttgtatcattataccacatatttgatcgctgatacttcccagggagtttgtttatgttgatgttattttcatatccgtctatatttcttatgggtcccttgtacgatgtccttggttcttttccaatatgatgctatgtttggcctcaagtccctgtccagaaaaagccgacagatttagcctcatgcagttataaagtccggtacattatgtacgtatatcacaccgagttatttttgtcgcttctttttacgagcccatattcgctccgtagaagaaatttcatcctagcatggtgatattcttgcttttctttcatcatcctttttgctagacgaaacctatataatctcggtcatcctggcccttcttgtctatttcttctccttcccattgcttcttcagaatacataaaatggctttcctttatcaccttaattggatcgatgtggagcctcgcatttcagctatagtgctgggcttacttgtttcctttctctttttctctgtggttgcggccgctttggtgtttacttcctatcttatagctaacgttggtgacctccccccgtctggtgatgattgtccaaagtacaaattcacaagatgctgatatgatttgctgaggcagaaccaagttcctttccctgcacgcaaagactgtacctcgatcttataccagcagtacaagtttgtcgtggatgggcctagtataataaagaaaggctatgaacaattcgcaaatggcttattcgaaatccctcggacattccgctttggtcaagtcatactatgccagccagaattgattgaagaactaagaaataaacggagtactcttgtctccccggagccatggattgatcaggtagggcttccgggtggattctctatgtttaggctaacaaatattatacagctcctccaggtctctcatgttatgcctggctatttccctaaggaaatgggatggccaaaaatcgctaagaccacgcccggtttgattcgtgccacggtttataaacacttgcatcggtatatgcccgctatgaatcaggcaattatctcgcagttgcagaccctagacttcagaaacgggggtaagttcaggccactctatagctgagattgtctctaatttcttcaaacagaatgccaaattggctgctttgatctggcatactcgatagtagctcgcagtggcagctttgctattgtgggctcgcggctttctcaaaacgaggaatatcttaaagctgtcaaggaccacatccttgggatgatagtgaccactcgtgtacaatttcttgttccagatttcttgaaaccgtgagtgagatacttcattgatttcattttccatggactaagacacgaatagctacattggtgggcttatcggtcgcctcgccactcttgggactagttgggatatgcacgcctcgcgtaagattatgctaagacacttcgatgcacgtgcagcagaatatcacgccgagatattcggtggcaaggggcctagtgagaccaattttgatgagtcaagcaatccggtacccctgtcttcccctccccctccatccaatgacaccatgactgaacgatctataggttgaaatcttccagtggctatatgaaagcagtgttcttcgggagcgatggacatatgcagaggtaataggcgaaatgttgctgctgcaatttgcctttatctataccacgtcctatgtaagtgctctgtacgcatgtcataatcctggaatctgctaatttaaacaccaatagggactttacggcgccctggctgagatagctcgacgacccgaatatattgcacccctgcgtgaggaaattgatatgtttttctctgcaatgggaccaaccgttccagcctgtgatggcatggttttgatggatagtttcttgaaggagtgtcagcgactgcatcccccttcggcacgtatgtcgcgatcacccttgggtattgtattgtgcgtggctaatgcaatgatatgatattagtctctgcccatcgggtctgtgttagtgacctcaaactttccaacggttcgttcttgaaaacacactaccagcaaggaaacattgagctgatcaagtatggaatacaacaggcatcacactcaagcagggctcccatgtagccatcccaagcggaatcatccaacgatcgagcgagcactatgcgaaccctgacgcgttcgacggtttccggttcgtcaagcgtgcagcagctggagccaaggactcccggcttgtcgacctgagcctagattatctggtttttggaatgggcgcacatgcctggtaagtcatgtttctggctggccattttattttcatgtcctggtttcaaacccaaccgcccgaatcccatcggctgacttttgctcgtgtttgtagccctggacgatggatggctagcgcgctcatgaagctcgccttcgcacatatcctaaatcagtatgacgtactccttcctaattcggcctccctgcccttgactggctcgctgtcattcgaggagttttatgtgcccaacttcggagtaaagattgctctgcgccagcgctggtaaggacatcacccgggtgtttgggtgcatgccaaagggagcagctagaatcttaataatgtttcgggaagattaatatttatttcatcatgttggacaatatacagcgcagcgtattctaccacttgaccataacaaaccaagccagtctgacacatcaacaaatacgttggttgccttggcgccttaaagcactatcagataagctgataagatttcgactcttatctccaactgtttcaacttcatctcttcctcgtcatccctcgaaatcatggcatcatcgtcttcctcccagaaacctcgacctctactcatcccacataagcgcgcccttttacccctaccaactaagggacaaggccccaaaatatacaaagtcctcaatcctagcgccatacccgcagaaatgagcatcaaacaatcatacgaagaggccactcaagaaagacgtaaacacacaacttcaagcgcgcataacaaaagtacatttgaagacgaagaagactacgagccccagcccccacgcttcgaagtctcgttctctatgccaccacagcccttcctcgacccaccgacttgggaagcgatgctcaaacacagccgtgagagactagcgacacagtcaacaaaagatgaaccgcgctcagcgtcggatcaggaagacgaatcggtagagcgaatgagacaacgagtggagcgcgagacggagtatgggtctatggctattcggggccggtcaagtgtacgtgggcgtgggaagaggggaaaggggagaggcaatgtctactggggtggtagacattgattttgatgtgttcgggatgagcttgatgctttttagatacccccatatttggttagtaggccagatacgaccatttgaatagccggctgcctttaaaacacctagaatagttatgtagtatcacgctttcatagtacatcgtgtgtgctcctgtattaatacattacttaatggacacatttacatccgccctggagccaagagattattgcttcataggccatcttatgttacacaacgtgaaagcaaggggcagctcggagcccttattcggtcttgggctgattagactgatgaacaggctagaaattcgatacttacatatgctagaagtaaacaaaacaaattaatggtacatctgagaagtcaacaaaagtcgagacaaaggaggaataaaaacaatggaatcatcatcatgggttggttcatggttcataatcatcatagatctcactcatatcaaatgatcatctcgggacatcgaagcaatttcaaaaaaccaaaaaaaaaagcaaatgcatcgtgaaatcgtcgggcaagtgtgtttgaaatgcgtgaaacatatcgaatcatgaatgtgaggataatatgagacgcaacggagaaaaggacatcataagtcatcttatatccacctcagctgtagcactagatgccacgtaaacagggccaccgatactccgtttgaggatttccctccggacagcacgctttctctcgtctcgtctctgccgtacgcgtcgcagacgattccgcacattacgccatgacatcgtctgaagtcgcagtccccagcgagagagagactggaagggagtcggccttaagggggatcctgttcggaacatgccctgatcaaccaagctaccgttgctagtcaccccattaaacaggcgtttcatttctgggctgcggcgtgctagagcagccgggccgtcgaagatgatgtgccgctggggcaggcctaaagagttgtttacaatcaaggattcatgggggcgcggtaaattgttccgcatcggcgggggttctttctctggggacccgggtacgtcatcccaaaatccgcggggccgccaaaaaggatactgacggctgtccatttccagtcctgcggttcggttcttggccgatttcatggagaaagaccgcgctatagtattgaaggaatccgaccgagggcgtgcgctccaggtacgacggacggacctccatcgtcgaccgaggcctgtgttctcatcttgagcgtcatgtaacggaagcgcgggaaagggtctggtggatggtggcttgggtggagtgcgagggttctttaacggcgagtcgacgttgaaggttgctgtttgtgatgggttgtccggcgtgcgagggggttggggatgatcataagaaatcccaagcgcctggaaaggtcgcctctcggaggcttgtacccgagggtcaacaagcagcagtgagttattgttgtgtgcgaacagactgaccgctgtagcctcttgaatttcaatgggtcccggcgaagacgacggaaccgagccttgggtgaaaggaaaagatggaggacgcagggttgccatatcgtctgggctagcaaagagggagcgcaaattgggagcttcgagtagaccattgcggtcaggcgaagccagaacattgtgacgaggcgggggcaccggctgatgctcacggcgtttttgcatcttgaggtcaatggctaagttatggcttcgtagactctcggaagtaagggaagtcgcacgagaattattctggctcgttggtgcagaaagcgacgagcttcgggggggaactgcgggacgctccgtgggacctttagaatcggtctcgcgatatcgattcgatgttgaatcagagacggtgcgttttccctgccccaagatatccgtgcggcccgttgatgctgtcagaggacgacgagttgatagacgagaacctggtttggaagaaacatgactggtcggacgagatctgagagatgagcttctctccggtatgaccactacgttgatggtttcgatattgggctgtattggactgttgctagtcttgaccgggaacggcatctccgatgttccgcttcgaacatcatcagagatgcgagcggccttgtgaatcaggcggtgctgggattcaggtagggacgcataagaggtacgctcagaccttgtgatgggagagctggcagaccgtagagagctcctcttttcggtatgccgaagcattcgctgggctcgtttgggggagtcgattatcatggcctcaacggtggatgtcgaggagatgaccgacaaaggacgggcgtctggtccactaaatattgctggaccctccggtgatgacgacccaatattccgacggaactgctccactgaagtactttctttgacttcaagcgcaccatttgcacggtcctgcagacttttttccctcatcaaagaggcatccaggtgcttcaaatccagtgcttctctctcgggtgttgatttatagactgatttagtgaggttgtgattttgtgcagactttcgctttcctgctaacggtgttggcgacccatcgatggggtttgcggcccaatgcccatcaaaagactcgaatctagtgtcgcatccagtttcaccatgttgagaagaagcaggtgacggagatccttttatatttgaagggtgtgaaagatatacatttgaggtgggtggctttgatggttgccgcctttgtttcggtgtctgggccgtggtctgagacatgcggactggggtgttcatatcttcttcagatgagatattctccaaagccgtttgaaatgaatcggctcgagacgacgaggagaaataattaaactggttcaaggtaggtcgcttattcgagtttgttcgaggaggcgtcacatccggggttggaggcttagaggcacggcgaggggtcaacatttgggatgttggaatatctgacagagaagaattcattttctggggtgttcgttcgtcaaccacgagttcttcgtggcctgcacccgggggtgtcaagggaagcgacggcgtcgcagtatgtctcccagtctgatccggggaggccggttggataacttcgatgctgggaacgattacaccccgccgaggcagcatcttgtgagaccttaagagcggccgctcaaacgcttgcaaatcctccgatgaccccatcttttctacgcccggcatctcggaaacagcacaccacggagacctgaagcatccacggtcgcttttgtgaattcgatcgaagggtttagatatccttgggcatcatagtactgggtagaacgtttcgtttagagggtcgcaagggtcgcatcacgcacgagcacttcgcgaccagatgcgacctggtcaaagtcaacggatctactccgtaaagcccagaggctttgctttgtctctgtatgatgcagggggtcgccgatcgtccgaggtacattcgagtccactgcaaaggacagacaacagtccaatacggagaaaggagcatggatattttcacaactgaagactccgatctgtacaatgtgagctgtaagggtggggatggacgatattgacgagtggctggggagtccagtctcaaaccctcttatccccgtgtttcagccaagtatgaggcaataaataatcatccagacaacggggggataagagaataagagaattaaaaagagttcaaaaattctcgcatgaaaagattgaataatctgacgaaggggctaactacagattccaacctgtttcccgctgattagcgcctgtttcctattcaggtaatattgatgccttgcagcctcatctgcctcatttcattaagacttcatcacacccgtgatcacactgcagatcaaactagcttctagatctgatgctaccatggcttggggttgccttcttattaaggtagtttcagtgatagttattataggttcatccttaagtgtgaattagtggctgaactacatcctacaatgtacgatgtatatgctcgacctaatctaggaaatgagatcatgtggaaacttgaaattaaatatgtcaatattccctgggcatactccgtactccgtaggtgtctggggtctcacggctctatcagagcccttacttggcatggttggcccttgatgtagcatacattccagtcctggggagagaggaatgaaatgcacatccttatttcgcgctctcgcaaatgaagaactacggatgtcaagtaaccaagcacatcatatgtatgtttggattctcttttccgatggctctcatttgaggggatatgatcttcatttgaaagtgtacacctagctaatctcgtactgcgaatacatcaaggatgaacacggtagactttcgaaaacttgaaatagaatttatgcctctaccatatgaggaaatttcctattcgagatccattcacgccattgagcgtgggtggtcactgcatgctcatataatgagtggtaaccctagacgatggacctcccaaggtcgggattcctagatagttactaagcacggcattaggccggggccccggcacacggctaaacctaacgctgtacgctgttggacggtttctcttatatgacttgatctacatagccatgtggggccaaatgtaggtaatatgtcaagatattcctaatacggaatatgttgtatatcaatggagcttcatcccatatttatatcctcctcacttccaaggctggtatgctttcgtagataaagtagataaagcattccaggaaagggttccaaggtcgagatccatcttcatactggggctctccggatgattaggagactagaagcatagcggatgttctcagatgggcaccataggttggttaaagcaatataaatctgtgaatttgtgaatctatgaatccagaattctacagatccaataatcccaagcatgtggcaacgggtgatgacgatatcaatatccacacaagccagggttgtaagacttttggaatcaggtcaaaccagcatttgatgtgaaatattaccttgacaaggtagtattgtctaggaatattccaagaaatcgaattgcctatacaggttaggagttaggaggtctggcctctggtctctggtatcaagtctctggggtatatccaaaagaaagaacatcccacagactatgcaatgaagatatcagaataatatactttgaatatagatagattgcccattaccgtggatcagtggcgtaccatgacgtcctgcgaggatggtggacttgtctggtcttggcagatgacatcgcagggaaagatctctcatttcgtcatagttctcccccgccatcatcttctctctctcctttttttcttggtctgtaggtttctggtcttgcttttctctctattcctcttgtttttgtgatttttcaaactccatcagtggagtaaatccatccttcgacttgtttgaaacgcttcccccattgaaaatccctgcttcaatcgccgacacccttctcttcgatctctctgttttcctttcttttccgaaatcaaactaagacatccaagacatctgtttacgaatcgcgattcttcttcgatatcatgagtacaatacagaatatcaagaatttcatccggcatggcaagcaggcccgccttgtcacccctcattctgagccgacgaccgacgtttccaccatccatgcagagccacaacgccaaccgataggtcaatattcacctgcgctcgaggcgtttggccctgaaggcagagccaatgccctccagaaacctgattctcaaatcagacaggatcgctctgtcgaaatcgaacgtctagtggcagaggagaacttgaaccgatcaaagatgcccaaataccctggcctagagcgctggatcttggtagagaagatgggcgacggcgccttcagcaacgtctatcgggccaaggatacgacaacggaatatggcgaggtggccatcaaggtcgtccgcaaatttgaaatgaacagcaatcaggtaggttctaccgcgaggtgccttgctcttcttgttttccttgtggtttttgtgttttccttccttcatcgttacatggtttgcaatctgtctataaacatggccaatacgttatgtagaacgatcctcactatccaacggtcaaaaaaatccccaaggcggcggaggtgcgcatacaattctttttctcacgctcggcttacttcatggcaacttgcgtctgccggcgaaatgatacactaccctatggcattgcctttttacatggttgtgcatcaatctcgtttcgtcattactgactagtcatttttaacagcgggcaaatattctcaaagaggttcagattatgcgcaatctcgaccatcccaacattgtcaagttgattgatttttccgagtcacggcaatattactacatcgtccttgaactttgccccgggggtgaattattccaccagattgtccgattgacgtatttcagcgaaaatcttagccgtcacgtcatccgccaggttgcggaagcgattgaatatctacacgagacatcgggtgtcgttcatcggtttgtcatcctgtctgtagcgatttgcgcttgtgaaagctaacattctcatgaagtgacattaaaccggaaaacctcctgttctatccaattcccaacgttcccagcaagaaacctaaacctcaacaaccaggcgacgaagacaaggaagatgagggagaattcgtccctggagttggtgccggtggtattggtaagattaagcttgcagatttcggtctgtccaaagtgatttgggatagccagaccatgacgccttgcggtaccgtcggatatacagccccagaaatcgtcaaggacgagcgttactccaaaagtgtggacatgtgggccatgggttgtgtgctctacacacttctctgtgggttccctccgttctatgacgagagcatccaagtccttaccgagaaagtggcgcgcggccaatacacttttttgtcaccttggtgggatgatatttccaagtcagcccaagatctgatctcgcatctcctcaccgtggacccggaaaagcggtacaccatcaaggagttccttgcacacccctggatccagggcaccgacgaggagactaccgctgccgcagacgcaccccctctagcaacgccctacctccatacccccgaaaaaggcccgcagcagcttgactcctccagtgccgaacacgggccctaccagcctgccagtgcccgtttcctcgatcaaccatccgttgcagcagaccggcgcatggacttccgatctccgggcgccttcaacctccgtgaagtctttgatgttggctatgcagtgcacagacaagaagaggaaacaaagcgtcgtgcgattgcgcgccaatccaaccgcagtggtacggcaggattccagtcggcactgggtgctctcaacgaagattatgacgacgaccccgaatacaccaacaacctcggaggccaaccactctccaaagtgcccactcgccaaggtgacatggccggaatggaagccaagctccgatccacgaacctcggtgctcaaagcagcgctgcacaagcacgacaactgccccaccagtcaaagcccaaacagggctacgggatgcatgacgccgctgtcgcgagcgctgcaaagagctctattcgcaagcatcagcagccgttcgagcttactctgagtggttccacattgcttgagaagcgtggccgtcgtaatcaaccggtggcataaacaggatgtatttcttccattggggtcatgatgtgatgtcttcataacgtctttacactttgttgatgagcgatattttcagatatttttatctcttgtgtttttgtttcatggccattttcttctttgttcgttattttctttttctcgagctctttgcgcgttatctgatcggtcccggcgaggaacctgcacgctacatagtcacaattggaaaatgggtgaagtgggttttctttttcgctttctcttgattatccgggagcttgcttggactggaatggagttctggcattttcttctttttctctttgctgtcgttatcataactaagggttacgtccatatttgtcaaggattggataagcatatttttcaacattgcaaggttggaaccttgaaaggtttcacgtatttcatataatcttcctttgagtagcagtctccatctagtcttttcttatagtactgacgtagaaacttattcccggccgctggtctattaagccgaagggcgaggtactataaagctatgtacttgatttcctccgccaaggcttcctatcttagctgtcgcccatttcttgggggcgctcagagtcaggctcactgagtagatttcagtcggggctcagattcagtgagctgctcagtgctcagataaatcatgtgatggaccactcaggcgcaaaatcagggcataaccagttgatcgattaacgagattgaatttggtaatatgataagaggtggtattctgccaagagagaaagaaaaagaaaaaagaaacgaaagaactcaagcggggagatcacgaataattccagcttttttctgcgcaacgtacagatgggcatttccgggcgaggtggcaaagaataaatagtcacgcatggccttccctgagaggcgtacatctcccggactgtctggcttcacaatagcacgctcttcaaaccagggggtaagtggcacaaaggcagaagtgagaatttgcatgtcaataaccattgaatgctggaaagccgggccattggcggttgttacttgcactacgcctcgcatggctccaatgtggagtaccatgttgaactggagtgcctggagatcggaagagaagagggtaagcacgttgcttccagtatcattgcatactaagaaaggccgtgtcaagtttccgatgccaccatatctgggagatatcctgatctgagcatgtagctaggttttgttagttaatgacctcaattaatcgttgacgtaactcggattgatatacctggtgcatatggagggtgttcgaataagcgaatgtttctgaaacagactgggccatttgctgcggctaatattcatagcacatgattagccaaagactcttgacaataccatatagggttggttatatgatatttgcctggaactcatgttgcgacatcatttgctgataatctaatgtctgaatatgttattagtatgagccagtataatatatagccaataggtcgaaggatattcaacaacatacctcgcaccatctgattcctatcttagccgcatcttcccacgagtccttgtcgactcgttgtccatcgataaggtagactgggggatcggatcgttggcgtggtccgagctcgccactttcatacaggcgaatgagggcttcggcattcacacgctgggcttcgccgaaatcagtctgcagacaagctttgagttgctcgacgcgctcttctggctgcagaatgttggggatcgccggacgactgagctgctgatactctaatgtctgaatatgttataagtgtgagccagtatgatatatagccaataggtcgaaggatattcaacaacatacctcgcaccatctgattcctgtcttagccgcatcttcccacgagtccttgtcgactcgttgtccatcgataaggtagactgggggatcggatcgttggcgtggtccgagctcgccactttcatacaggcgaatgagggcttcggcattcacacgctgggcttcgccgaaatcagtctgcagacaagctttgagttgctcgacgcgctcttctggctgcagaatgttggggatcgccggacgactgagctgctgatactctaatgtctgaatatgttataagtgtgagccagtatgatatatagccaataggtcgaaggatattcaacaacatacctcgcaccatctgattcctgtcttagccgcatcttcccacgagtccttcgccgaaatcagtctgcaaacaagctttgagttgctcgacgcgctcttctggctgcagaatgtagggtatcggacacggacatgcaggactgaattggggatgtggatctggcatattggagatggttggtggaaaatgtggaaaatgtgggattgtgtgggttagaggaaagtggtggggctcgcttatcctagtctggttagcgtgtcacatgtctttcattggataataataccttaccgcctacatcaccgccttcacaaaccatcttcaataatagtacgaccaaccattgatctcagactatatggcttttttagtgtatttctttggtatcttatttggtgtattttatacttatctagcttttttagtacttatgtgagcactgagagagcttctcccattcctcatggccgtctttcgcatccccaatttaaacgaggctgaggtcgtggcacaggtcgtggcactagtcatacagaaaggctgaactctcttctgaaaaataccgctcgttcaaggcacagacagaataccagtaagtgagctttaagggatcgctccagatgtccagtgggcgaaagccacttttacccactgagcaaggtaaatccgaaagtggcagaggaagtcaagtacataggtagacaaagaccagtggtggctttttttttataggccaagtacattttatgagttcgtgatttgacctggaatttaagagagaaaaacacaaacttggtatcttgattggtatctatgttcaagttcagaggccacctgggaatggccactggatgatgatatatatgacaagaacactctatccggtccatatattccccccgagtgctttgagcatgtcaatccattggtcgaatcattcagatcgcaatggcaagggaacggattcgtgatatatgggtgcggtgtccgttttcattttgtcgagttctcatcttgcactttccaacacaagcagaaggctgtgtgaaaatcgacaatatgcaagacattttggcaaaccgaagagatttaatccgcttcttaaagggtctgcttaccccgagtctcaatgggtagaagacacatagctacaaaagaagccagaatcaacccgccggacgcatagatgggcgagttggggttcgcactaccggcatatatagcgacaaggggagcacagagaccagtgatacggttcaagcagctggagataccagtgccagtaccgcggttcggagcagggaaggtctcgggggtgtaggcgaacaggacaccgtacataatgttctggaagaaggcctcgagagaactgcataaaagctggatgtctgagttcgtagatacggtaaagcagaacagcaacacaccggtgatcaaggtggagattgccatggtgcccttgcgaccaatgtacttgagctcgaccgtccagcaagccagaagagagccaggaagaccaacgatagaggtgatggcgtaattgcggtaagtgatgtagttcgagttggtctcaccaccggatttggagaggtactgcggcaggaaagcgttgaagagagggtaacccatgccgatggtggcccagcagaaccagagcagaacggtattccagcccatgcgcttgttagcgaacaggggcgcaatgcgctccattgaaaatttggagaagaaacggcccacgatttgagagtaagggagccctgtctctttctcgtgcacctcgacatgaccaccaatttcgttgaggatctcgctggtcaaccaggtcttagtgccgttcttgtgggcaatgccatgaatagcggcgacggcttcttcctggcggccacgggagagcaggaacttgggcgactcgtacaagtggaaacagaagaaacgtaggatgaacatgacaaaagtgatggcacccagagtgagaaccaggtagcgccagcccatgttgttctccttggtgcaaccttcatagctagtgcagctgaagttaggaatgaaagcccatgcaagcagactgccgattagttggccaaaaggccaccagatactcaacatggtcaacatgttgccggagacaaaggggaggaactccaggaaaagagcaccatcgacaggcaggttaccacctacaccaagacccaagcaagcgaacagagcacatgtactgcatttatgatcagcgcaaaattcaaaatgagttattctcatgaagacttacccaatccaagtagggccaccaccggcagccagaccaaaggcaccagccataaatagagtggtgttaaaagcaagacgacgaccaacaatatcagacgcaataccccagaatgaggcaccaatacagagacctaagaataaagcacaagtggtaaaacgcacccacgtatcggagagtccgaattcgtaggagataggggtcagcgtcagggcaactccctacacatggttagatttgatttgtgtgatttgtttgatttcgatctcctacctgaagccaaaggttgtctgctgtccaaccaaaaccacaaaggaagaacagctcccattgataccggcccatgccgatatcctgcagggctctgttgatcacctttgccttgcctgtgtcgtcgagttagatcaaacccccaatttcagggagttttcatacgggaactagtgtgaaaatgtgggatgaacatacggtcataggcagagtcatgggtagccgtggaaatatcagactcgatttctgcacgaagggcttcgagggtcagatgagttggatctttggagccagcagcaccattctccgaggaagacgagcggtccgagctctggctggactccttgtctatcttttccgagagggagtggacaggcgcatcggcgagtggtatgacaacgctgggaaatgtcggactatcctttttgaaagggttaaatttttcgagtcccataatgacggttttatatggcgctttggaatatagttttcagtcgcctgggatttgctgcttcctgtctggtatgtcgcttttcgcttgttctataccgtgaatgtatcgctgggaattcgatgagaggtcgacggtagatctacagatgtgggaaggagttgcaatggggtcatatatcgtaaatccgggggcaattcgctgtgggccgaaagtgtcgcaaggacaatggtcgagatatactgctgtcagggtttgcaaatgggcttgtcgctatcgatgctgggtttgtcgcagtcgcagtcgatgagacagttgtctccagggtagtgcaagcttgctactgaagagcggaagtacctcgtgcgcggcctttgttgaaatggatttcttttctctcgcaaggtgatgatgaatgatataaatgatccgagggcatgaaccagaggttctgccacagggatataagataaaaagctaagagacgaagctctagcaagatatatgaaggaattaaggcaagctgggggtagctataccttgtccaagatgttttgagaggtagcgaggggaaagttgcgaattgacaaaagaggaaagaagggaaaatggcgaggtgggattccagagttgctatatactattagggcaatatgcttccttttttttctttttcttttatattaccattggttctctagtacgagatttcatcactggtcaacgccgaaaagtgggactgccaggaaaaggtgtgatgacattctgatattctgctatggtctgtaatttgaacaaatctgaacatttgcccgcctttggcctcgccgagtgcatataaattagaatgaagacatacttggcagttggacctgatatgtttccaggtttggaaaccgccctaccacctgccgtaactagaatgagctttctataatgtctatctccccttatttttctgtggttgggctttcatagctgtaattaaagcatatcctcgtactctattggtaaattcaacactcatcttttatgagcagtaccagcagaatccaaggtggtcaaaaagaaaattgtacataagaggttccactatggcgtattatattagtaaaattgttgatgttagttaataattcacagctgcacagggaatagctcaaaaggaatactcaaagacctgtagcacggtacttctaatgttcttgcgatctaggattgaacgccaccgaggtaaatccgatatactattcagcctcaagggtcttcaacttctacctttatacatatccggctactctgtatgcaaaattcaaatggtcctatatagtcatcacagatatatttaccaacatatcaaacattagaaaaggtcgaaataatgaacacatttgactctaccctgacccgagacctcattggccttcatgatccaccagaaaaattttgcagtaagacagaccactctatccgtacccgtacctctcactagtactcttgttttgggcgaagtattgagaatacggagatcaagaaccgcatgcgtgctccgcttgaacgtcaccctctacgttgcccttcttacctctctcccaagatattcaagatgttttagttctacagtataataatataacagcaatcctggatccttgcgaataccaaaaataacgttaaaatcttgtacaacatagaataagaaaacaaaaaatggttgaactcaccaacgttgaggatcatgaatcttggcgggcgcatccatgccgcattcagaccagggggaatccttgctctcggccaatcacagcacttgaatactcccgtaacctccaaggctccttcccggataacttactgcttgccattttgggagtgttgtgcatacggcctctagcattacctgctcggaaactgcttatgttcttgacttggagagactctacacggctcaatactgcagagaataggtggctctcggttatgtgtcgaacattcttaacatccggtttttgttccctttcaatacctttcttgcagagtggataagtcaatccgaaaatttggagggtcaggaacgactccactaagaatagcttttacctttaattccttgtgttggatcactacggtccggtttataacatacaacatacaaacaaatcccctgcaccggcccggcgattgtcgtacatggtttgtcccttttaatatgcgaaactggtaaccagctagagtacaccacttggtagcggcttgcgatgtatataccagccaaagggttgtgcgtgatttctctgagttatactgagtaccttgtagggcactgcaagagatttcaggtactcgcaagcttaggcggaatgaaaatactactcctaccaataaagccgattctaggcccgccaagacttccacacatatgttgtaatgaaggcctaatcgggcaagatattcggcattcattacagtcaatcgtatgaggcatcagaaatagccacggcatagggaatgataaactcgatgggatttgatctctagataccctatggtgatacactttgtagcctatttccagactccggtgtcatgcatgagcggttctgccctataaactacatagattcatggcttatattttatatacatattgtcttgatataaaatctgcatatgtgaggattcgtcctttgctaataaaacactagagttcctcggtgcgtctgagcaaccattcaaggtggcgataagccacacgaggctggtactgcggttgcatgtgaccagcctggtaactctgagcccacatcagaccacgctcatagtgctgaacacccatgataccctgagaaccatcgagactagacgcaccgttctccgcaaagacatcggcgtacaagaggtccggaattttgatatcgatgggagtgtgtggcttcttttggaaaccgaggtggccgttccaggtcatattctggatggctaggagcgtaccgttggtgataataaccatgtcaaagtcaccgtttgcaatgagaacgcggttagtagcctcgatgacctgcggcaagacgtgctcgatcgggttcgccgaaatgtcgccttcttgctccgggccggagtcgccaccgacatacacgggctcgagggaacacccgctccaggtctcattgggcgcgtgtagcgctcgcttgacatctgcgcgatcgaagtagacgcttgctccaggcgcttgatagtcgagcgaggtggggaaggcgagaacgtcccagaggagcgggcacatctggttgatctcgtagaggttgaagcatgggttgatgtggaagatttcatcgtagacgaggtcaaacagatcacagtcgtcggccaagctgctggataacatgggcggctggactttgggtggcgggaaagtgaggtacttgtcgatgaactcctcgtatccgcaggatttgtgcttcttttcgagctctgccatgaatgattcgttgaagttaaacaggtttgcgttttgctggacgaagggcacaacgggcacttcttcctgcacggagtcgaactgtccaatgcacgggtcgtatgccagcgcgcctgggtaagtagtcagaatttgcatccaagcctcttgaatattcgcgataactcaccatctaggtcgaaatactccttgtctttttcgtcgagcatcgcagctgagatgtagggcacgtaacgtccagcataactctcaccagtgacatagatcttgaagttcttaattccaaaaatcttctggaagttcttgaagaacttgacaaagtcctctgctgtctcttcttgtgaaacagcagttggtgtgccgacggagtagcctgttccgataggctggtcgaccctgcgagatgttaacagggtttggggttcatatgcatgacaattactcaccacaacacattggttaggttgacccaagcataagggttctctaccggggcaaaagtaccaggttgccatatgaaacgaccagtctcttgcaagaaactctccatcgaactgcatccagggccaccgttgagccagatggtcacttcgtctacgggctcgttgatggtaggctggaaaatgaagaagagcgatctggagctattgttcatatcaattggcaccagaccagaatacatctcgccgatatcaaatgaaacatccggcagggagtcgaccaggtaatctataggtctattagagattttgctgctgacaatgatatagctcgacactcacgcttagtcttcttgctcaagaagcggtaatctttgtccgatttcgcatgtttctggttacgagcctcaactgcccgtttggccttctcttgtggtgcacgagctatctctgcaaagcgaccgtgtttggaggcagtcgcaagatccgatcccagcgaaagggccaggagagcagatgacaggactgacttgagtaacatcctggaccggtgggtatgaatgggccagagggcagatgggatgtgtctctttttttgtctcggggagaggacgcagctatatactacccccgaaaggccctaccaatagccccccgaccggtgcactcggtatctgtaggcccatttaatttaataaaaggctaccttgccagaccaagtgcttccaagtggatgattggaagaaatccttagctccaggccggatgcttcttctgcgccacctgggcacgaccccttgttcgtatccactgttatcgcatcccggggtcgaccccaggatggtaggctcacctgtgtatcttgctgctacttcttttgtccctggtctaggtataacgccggtggtttgtctgcgatgttgggcagttataaaaacgctaatcgcatgaatggttgctctaataattcggtcgcattgtgcatagctatcattgggaccggatgagcgacggattccggcgagatcgacgtttatctctcactttgggataacaaactccgtgagcgaaaagcgggggcagctcgcgattggtctggtgtgcttcttgtcccggataagcatcgcgtagcctggaacagttgtattggtctgatagagaaatcttcataattattcatatgttgtacgtactgctcaaaacctcacatatgaacatcatctgacttatctcctttggtggatagattcggcataccggggaagaatactgccaggtgagatccgtatatgagccgaggttcccgcagctcttaggtataatttagatcctaggcatgccaagctttccaccaatagtagctcgaaagcacttgttctaacaggcctcctttcactgaatagcatcagctgatgtgatcaaaatactcgatagacatgttccttttttgagataaataagggtccttctactccgtagtgtttgtttgtttaacgtagtctcaaaagcgaaaacaaaaaaaaaaaaaagaaaaaaaagtggactcgcggggaatcgaaccccggaccactcccatgctaagggagtattataccactaaaccacaagcccagtttgatggaagaggctgccttttaaatactgatgagcctacacaataattcttgcgctagactactcagcagacaagattctatgctagtcaagtaagactaaggttgcatttttaaatattacatgtttcatgcttacacacttctagaatttccagcctggggaggttatatgagattcacatacattaaatggccgatgataaaaacctgatcgtggttatatatatatatctacctgcatcaccatccgattgcgtgcgattccatgtatagtacatcaaccttctactttttctttagaattgtagtaatgtattcaagtataaaccaactaactagtaaagtcatgtctacttacgaatagttaatgttatgcccggatgtagctaagtatatgcgctccgcatgcgtttcgaatgtctcgcggagttcggaagttcggaagttcggagttttaccaccattcatagctatagccgacaaatacattgaatcatcccgtatagattgtcattctatatgatgccaacaaaaagaaccgtcagtaatgtatatcaatcaagctatgttgttcaattgagagcaccgagtgatagttctgaagtcccccatcatttagtcggtgtagaacaacatgtatagacaaataatatccccaaggcgtcgggtatggatctaagcacgatagatccacttccttccctgccaattatcacgtaccccgaaaatttctcttctttaattattacacttaaactccaatgggattgattccgcggaaaattattagcctgggcacttttgcatatgagtcttttggaagtttcgatttctaatatgtactgcccctccttcaaatactttctcctacaatatcatcctggatcctcaacctcagagatctaggacttcattaccccttaatgcaacaaagagaatataatagctgctctctccacatagaatgtctaccaatgtcgggtctgccggcggcaagaccggcgatcatgaattcgatattttgaacaccaaccagagcgccacatcctttgaccagaagactactgctcacatggtcaatgagaagtttgacacggaggctgcaccagagcaagaacccagcctagatgatgtataccggacagcatccaccgtggcaccatctcagagatcagccagaagagaccccattagtcgagcgactacagacgctgaagggaacatctaccccgagggaggactcgaagcctggctggtagtgctgggcagcttcctcggtctctttggatcgttgggcctggtcaacaccattgccacatttcaagcatatatccaaacccatcaactaaaggaatacagctcaggaaccaatggctggattttcggaatgtttgcctttctcactttcttctgtggagtgcaggtcggtccgatctttgatgctcgaggcccacgtattcttgtcttcgtgggttccgtgtttgaaatggccatgatcatcctgctcggcttctgcactgaatactggcactttatgatggtcatcggtgtactgggtggagtgggagcgtccctcattttcacaccggcggtctcggcgattggccactatttctatgagaaacgtggagttgcgactggcgttgctgccactggcggctctgtcggaggcattgttttccctctgattctagaagctctattccccaagattggctgggcctgggccactcgggttgttgcgttgatctgtctggttgtgctatcaattgcaaacctcttgatcaggtctcgactcccgcagaagccattttccaaggagaacgtgcttcctgacttccgcatctttcgagacccgcggttcgtacttactaccgccagcgtcttctttattgagtggggtcttttcgtgccaattagctacatctcatcctacgccctcgaccatggtttctctagcaagttctcataccagataattgccgtcttgaatgccggctcattctttgggcgatggctgccaggattctttgccgattttcttggtcgctttaacactttgatcgcgacggtagcgctctgcgtgctctgtaacgcctgcctgtggcttcccgctggagatagtatgcctctgctgatcgtttacgctgttatttttggattctcaagcggcagcaatatcagcctgacgccagtctgtgtcggccaactctgcaaaaccgaacactatggccggtattacgcaactgcctataccatagtgagcttcgggtgagttttttttttacttgtgatgtcacttgcgtatctataactgacatacgtttgccaccagaactctcaccggaatccctattgcaggtgagatcctggcacgctgtgatgggtcttactggggccttatcacctttaccgtatgctgctatgcggctggtcttgcatgctgtaccgccgtgaaggtcattgaagttggctggcgtcaccctctcgcgatctattaaatgtttggattcggtatccgggaccccgatgctggttgatctaataatctcgacacgatttcatgatttcaaagatgagcatagacagaaaagtcctttcccccttcggcttgcattttatatccggcgtccatgaccgagtgatttgttatacatatgtggttgctagtaatgtctatatttatcaatctgtgattgcaattctatcgttagccaactagtcggatgcaatttataaaatttccgacatgatcggttcggcccttcagctgtactcgaactggtagctagaaataaaataatttgccgccattgaggcaatataaaaaaatataagggttggtaactcagggtcaggttccctgcagggctgaacagggcagaacacgtcgcataagatatccgacaggcaccggagctatgtaaacatctggtcacaatgatgcctttgtaccttaaccaaccatggatttcaccactgggaatgatttccaataggagcagactcagctcttaccatggaaactacaaagccatcgaaagcttaacaaaaaacaagcatcgacatcaccccaggccagtccctgtcgctgctatgacatcaaatggccattaatccatcaccattgagtcttctagcctctcgctacatatacaacgttaatctcgcatctcctcctcaacatccttttgcactcgggactttgctttcctttcaatcgcctcgaactctctggtgagcatttgcttcgttgctcaactcgctatctaagaagtcctgacggccttctacaccagctcatccatcaaaaccacagcacccggaaccaccggcaaacttgcatcggccacatttgctcaatcgtcctgcatatacttgcgctggtccgaatcatgttttcaacaagatgcttggttctgctagcctgctccttgactcttctacggggtgtcgtggctgtcccggcggatgtggcgctagagcagcccggccttgaggatcgtcgtcgagaggagcgtgactttggactgcaggagcgccacggccatcctgagcttgagagctcgctactttctattctaaccgagaagttagctacgaagaccgccccaggaggaggaggaggtgctactaccgtccccggtgaaggtggcgctactaccgtccctggtggaggaggtggtaccacggtccctggggaaggtggcggtactaccgttcctggcggaggtacagttcctggcggaggtggcgctactaccgctcctggcggaggtacagtccctggcggaggtggcgctactaccgctcctggcggaggtacagtcccgggcggaggtggccccactaccgcccctggtggaggtacagtccctggcggaggcggtgctactaccgtccctggcggaggtggcggtactacagtgcctggcggaggaggtgagaaatctactacattattttctgcaagcactattcttactctccctgatactcaaggcggaacttcacccggtggaggtacgactgctactccaactgggggcactgaaacttctcccactggcggtgctactacgacaaccggacctgctcctggcggcaatgttagtctcccccccacaagcggcagcgtcgggccacccagcggccccgcttcctctcccggcggaaccactcaatacatccatcccctagtggaacccctcacccgtcctctcctgaagtagtaactgaaaccactaacactagccagacttctcccactaccagtgagcagccaagcaccacttctcccacgggtggcggtggtgtatctccttccccatctcccagtgttaccactggaggcggagttccaccggtttgccccactccttctacatctagggaaacgacagtcgtcccagtgacggtcacctgtcccgccgtcgtcgtgagcaccgccaccaccaccgtcaccgtcacatctggtccggccttgtcgggaccaacaggttgtccttgccccactgaaggtcccggtggaggtcctggaccgggtcccggaacaggcactactggaggccctggagcagttactagcgaagtgtccccaagtggcactgcaacagcttcaacgacgaccactagcgaggtctccccaactcacagcgtgacagccccaacgaccacctctagcgaagtctcctcaagccacagcgtgacagtctcacccactagaaccggtaccctgactcggaccctgacccagacccggacatcgacgccccttgtaccaactactagatcccgtaccacagtcaccaccactacaccaggtaccctcgtgactttgcctacaacatcacatgtagctcccggaacaccaggtgcgtcacgtgttactccacgagaatttatcagtcaagatgttgttcgccgacaattttttagcaacgccacagcaacccccctcttcactaacacgagtactccctcgaatgccacgacgagtgcagtgaacatcacccgtattgcgacggagactgctaccgaacccgcgcccgctttcctgcctcgcttctaccgtggacggatacgtgtttaaattgtttggctgagttgggaagaattgactgagatattggttggttggtcgttggaaaatttagatcggtttggttattgccagtttttgatattttttctatagtttgagaggagtttaatgtatttggtggtaatatgatgttgctggtgttcaatgtatggcctcgggttttgtttcttctaccattgacgcaagtgtctggaaaccactgctagagaatacattgacactttaagacatgaggcttattatacttgtttgtgacaagtcatgatctactctctcgaatctatagaaaatacatgtaacgatcgcttgttttgaatgacgtacagaaggaacaaactacgttatgtgagaaacgaggacgggattctatcattggtttttcttctctaaaatcaaaacacatatagaagcagtagcaatgcaccagaaccgaaaacccttcaaacccttcaaacccctgtcaggtctatagctcacactagatttccgcctccaatagagcctgacctatctgtgacggcgacgactattttgccgttcaaactcttcctcgtcagaaatctcttcgacatctgggtcccactgagcaggttgttgcaaaacggtggggatgcagctgatcagatcatcggcaacgtcctggtcggtctcccggtcgttatgcttgcggagaatcctgattgagataggtatgacaagctcaaggttacggcacagccgctcaaactggggatcacgttctacaaccgcacttgagatagatatgtcaatttcgccagcaatctcctcttctaaggtggaaatgacatcgttacgacgatgtggtccatggcgaagatagtagattgcatcgtgcagacatgacaagacgaaaatacgtcgctcgttatatggatcatcggctagtacgcgctcaagatcatggcgaggcatcgtaggcgaacaccagactggtaatggagaagccggttgatgtgtgacttgcaagtgaagtttgttgacgattcctggaagcgaggtgcgacaaatagttggattgcccgatgcagaatccgatgtgtcttcggtatgtttgtataagaacttgagaaggtggtgggaatcgaaattatttatgcatttgcacggagtagagttagcactgattcgatttcatggttaacgtgtttgacaaagacagcaatgacgacaaaacattttatttttattctctcaaagaagaaaaggaatattgaggctttgattaaatttcgggagacaagaaagaaactcttcgcctccgtcatactcacaaagacactatttatatcttattaaaagagaggatacagtccatgacagggaaggagcaagaaaccggcgggctttttcgcagttgcataggagtcaggatactgagagactggaaatagccccaaagcattcgtaacactaatcccataatctccatgcaagtattatgctgcaggtattggttctgacactttcgtcatgtttaaattcgtacgtcaaatggatggactcgataaacaaagagaagagtacaaagagtaaaccaaaaaagaaaaataccggtgaccatatgccatcaaataaagaataaactgccagtgttctcattgcgtctttctgaagaatccatagatgttacttgtccgctaagtccatcagtaaggatttcgacagatttggacatttttcatatcacttctcaatactctccctaatctatgattctttttcctagctaggcaaataaaattttggtatacactgagtgacatatcggcaccttttataaatattgtatctctcgtctgacggaggcccgatgtttcatggcgttcaagattgagccggaatcgttttccgttgcttacatgtaatgtactatgtagttacttctcccaacccagtccctgcgatataacggagtaattaaataaaccacaccctaccagactttcaacaatatcaactactccggaccgctatatatactccgttgactctaattatctcttatcagttgcgccgataaagccgacacgctccacagtgacttgggccaatgacgcaacgacctgcctgattgggattagcggatgtttggcatctccacatgatccaatacgagcccgtcccccgcgtttgcttttcagggagcacatatgagatcgacaatctcgccgaatgatacggggtgttcgagcatatctacaacgtactatgtacatagccgaactaggctgccatgctgtctatatcagatttggctatccgcggttgccggggccacgacggggcgatggtccaagtggagggacaccgtgtaacacctccacagtgcataagtacttgccccggttggagttgcctagaacggctagcgacatcaaaccttggaatggacgccgaggacgagataagcgtgacaatcaattggccccggggatcatcgagctcaggtatatgagcccccgttcctcagccctgcagaatgagtgcatttctacttcgtactcattatttcctcgattgctgacacctttacaataaaccaagatctcgctttcattacttttccctccatcaactcgtggaccatcaccacttcaactctacttagatggcggttgtctttatctctcactgtccccaacggcttcattggcattcttatactatatctctgtgtcaggccattcgcagagctagtagaaaaagtacccggacgtctaaacccgttcgctaagaacaattgtcgctgtccaagaaaacgtagtgacaaaccaagaacaagaacaatgtcaatcgaaatcgtcccgctcgttgagaacgacatacctgatgctgtaaactgtgtgcagaaagcgtttgccgatgatccctattttcgctgggcgtttgatgatccatccaaggtatgagatatcttattttgcgatgtacccaaacgacttcgttgtggctgtgagaaaaacatacaaaaagaaataaaatcatgaaacaaaacgaagtcgatgtcgaaccaagtaataacagggtttgacagttcaacatccaacgaaacgcagcctccctcgctgcccatttccaatatggtatcaactgcgactgccccatttctgtcgcgaagatcactcgcgctgcaaatgaaagcaagagcgatgacgacattcgcataccagttggtactgtggttggggttgcctggtggtactcaccacaagcgccttccatgccagaaacctggtctgtttgggcacaaggctggcttctttccttccgacagcttatgaacaatatccgcttccttggtcgtggtggtctgaatgtgcaccggtattggatttggaagcaagtgcagcaaactgcacacgatgccatttggcaggacccccgcgggtactacttttgcaatgtcgtctgcgtcgcttcggaggcgcgtggtatgggagtgggaaagatgctcatggataatgtcatggacaaggccgaccgggagaatatgccgtgctatctcgagagctccaaggggtatccaaacgtgggtatttatgaaagaatgggctttgaactagtcaaggagattgaatgtgtggacggaggggatgtttgcaaggtgtgccctcttggctgtaattttccatgtcaaatgactgacgcactaatccagttatattgcatgattcgcaaacccaagtccaaagaaaaaggctgtgataaattttccgatactgttcattaacacagatacacagggagattgagtgacatggctcgattagtatttgaatcaagcatttcggtgactgtcatctttgattgctttaacaacgtgagcgagatgatggaaataatcgaatatagcttttctaaagcttcgttttcccagagctaatttcttttccaatcggcgtctcttttgtcttgggtttcggtcggggaatgccacaaccggttatgaaggcctctttcactttctactgcatctcagaagactttatctgagaattcattggcgctcaccgtcattttgtattaggaatatggcttgttttgctgctgtaaagacaaagttgagagcgagagaggcacatcaacaaccatctattttcataaatcgatctttccaagccatgggcgagggtgcaatgcctctgtagaaccctcggaccccaactggaaagcagtcgaatatgaatatccacttccgggtctgcctgaattaggcttcaatctctctcaggtcaacgcctattctcagagcatgagtgagcttctacacgtcgttcgatactgtcgacaaacgcctgtgaagtgatagcctaggtgagcgcttatgatgtctctatttttagaatcagttcaactatatacatatggaagacaaccttggaaggagacaggcctcagcccatgtcgcccttatgatcaagcccattttcctagcacccccatcagcaccagcccactgatgaaggaaataccaccggttagaacttttcctaactttgcattcaacatttcacctccctcaatgacccagtcacgcgcccacatatcaacgacaccaacccacaccagaataccagcagacagcgcgtccaatgttcctagtgcaatcaaagtgccccgcgaattaccattgaaggtgtgaagaacaccaagcccaatagccatgccaataggtgtgatcaaggcaaatgctagcgccatggacgctttgttagggaatatagctccggggagggttgcaatacgagcaccgagtgccaacccttcaaagaattgatggaacacaatcaccacaagaagtgtcttgtagaatgagtcaccagcaacgacaagggtgaggccaatcaaaatactgtggaacaggataccagcttccatgacaacgaccgaaaatttactgtcgggtccggtaaggtcgaacgagccgtgattgtgactaagagaagccaacgtggactgttgctgttgcgccgaagagtgttcatgctgtcccttctgctgagtttgctgagactcggacggtatggtttctgcggagatattcttgctgtggcgagcaacaataatccggtggccaatgtattccagcaagaaagcaatgaatatacctgccacgactaccgcggaggttgtggcttcgtactcgagttctcccaaacattcgttggtaaacatgaggttcgcatgtgtgtatagctaaggaaaagcagtcagcaagtgatacgtgtgtcaaagttgaaattgcttacatggatgaaacccgtggcgatgatgatgccagttccgaattgtttgatgacggtcgagattaccccattgatagaggcaaatggaagcttcatcaggagaataggggcaaagacaccaattgaactagtgacaaggacaacgaacaatgtgccaatcctcagagggatatcgtagtctcttgcttggacagtacacgttgaaccagtactagtttcctctgatgcacctgtactcgtgcagtgtctagaatagccaaagtcaataacgcctaaatttggaaggattattacaaacttactcgacgccagcgtggaagtggcagttttgtgaagcttcgcttgaggattcctcctggtcatcttcactgtcttcggtctcggtctcggattccgttccttctgcttgaatcaggacatcgtttccgtctccatccatgcagtatctttgaattttgtagtttagtatattgtcacaaatatgcgtacctgtggacttacgactggcttccgtgagagtgacacccagtgtattgtgctggtactccggttgtaggggtagatgaggccgaaaccagaacttcttggccatctccatcaatgcagtaaatgcttgagccatgagtatgacaaccagttacagatgatgattgtgctgatgttgttgctgtagctgcatatactctggcaatgcccagtgatagaaggaagggccgaaaaatgcgcatgatgaagctagtgctttacccttttgcaaataagaacgttgggattgaggttggaattaggatcgatgcaagaaacctgccacaagtgaggagttttcaatcaatggacactgggagcactccgctctaaaaagccgcataatatatgaaaaagcaccatacataggtgtctcacccccaaggttctcgatgccaagcggaagacctttccaccctttcgccaagagcaggcctgagcttgcgattcgggctttgtccggagaatatcgcccactaaacccttgtactctcaaggtacctcccgcccaagtgtcttggcgaccctccaccgagcctttgtcttggcatcaatctgagattttcagctctgattgctggagagcaagatttttagcgagaaaagcgctcgagtgagctctcaaggtcccctctcagcaggtcgcaccatctgtatattgagaaaaatggagaagacatcccactttctcttctagtgttgccttggattggatcgcaggcatagcgaaaatgcgcccaccaaaagccacacttggcaaatagttgagaaaaaccaaaatggtcgaatacggaagctttggggaacttcgtaaaaatggtataaaagctgctcctatcgtggatagaaacttacttctacaatttcaacttttcaatcaatccacctcgattatacgaaaatgcgcttcttgaatctcgttctctctgcagcagttgctgctgctctccccacccccgagagctccgaaggcaatcaatcccagcccttctctcagaatggacttgcaccttgggatgccggcgctgtgaatgaatttcccatccattcgagctgcaatgcaacccagcgtcgccagattgcgcaaggtcttaacgagactattgctattgccgaacatgctaagaaccatatcttgagatggggaaatgagagtacgatctacaagaagtttttcggtggtcgcccaaccatggaaaccatcggtgcattcgatgtcgtggtcaatggggataggaaagaccttttgttccgatgtgacaacccagatggaaattgcgacattgaaggtattggatcttgctctgtgttagcgatgacttactaaacatttgaactaaataggctatgccggacactggcgaggcgaaaatggcactcatgagacagtcatctgcgacttgagctaccaaacccgtcgttccctctcaactatgtgcggccttggatatacagtctcgcaatctgaaaccaataccttctgggctaccgatctcctgcaccgcctatatcatgttcctgccatcggacagaactgggtagaccatttcgcagacggatatgaagcggtcgttgacatggcgaagacgaatgcgacgctgtcaacccatgattcggagagccttcagtattttgcactagaggtatatgcttacgacattgctgtgccgggagttggctgtgcaggtgtccaacatacgcacgatgaagctgatgaagctgatgctcaaacaacatccgcggctgtgactagtcagtcaactcctactgcaacaaccaccgatgccccttcgacaacctcctcagtacctgcggtgagtcgctctctggttgcattgtggtgatcagaaactgatttgaatagaactgccatacacatgacggaggcgtgctccactgcacttgatatttcttacggtgaaatcactcaggcatcgagacaaagatcaaacattggcgggataatagtcctgacgtgaaggaaattgatgggtgatatatgatatcaggagagaggaaaggggttctatgggcccaaggcatcagcctcagcagatttacggattgtaatgtattatggtctatattattactgagcttatttgctacttactatgcgttgaataaataaacatgtatccaatttctacggtttgtatttggctctcgtggttttgtttattaagcatagtggatctaggggtaagaattttttcgcagtgagttgttgctatcttgacttcacccttgccttgcccctcatatcgtagcagctatcatttttgaggagttgttaggcttggggtaaactacatagtccatctttgataagtaatactggcctattagtgagtgagtggcgaggctgggttgcatactgaggtcgctatagatactaactggcatgatcatgaggtagttatactttgccggtattactctcaacatccgcctgatgtgtaaaaccccatagtaaaataaagtctaaagtctaataagaagcttaattggccgaagtatgacatttctctgtagttacttctccattattgtacatgatgcaggtgagcgattcttgagtatttgagtgccatccaaagatacttcgaggttcgtaggcaagtcaacgtcaatgctgcgagtgagccggcgaatgaatatatattcatgtgatcaatagtctctcaaatctcctatcatatttaaagggatttgggttggacgtacgtgtattttgttctacattctatgtttttataaggaacatcgtcaagatatatatcaataccattacggattagattattttgctccaacctaacatggcctatcatagaaaaacgcccaaggaaagtgatcaaaaaccacttctctatctcattgaacaaatctattgaattagttgtagccgaatataagaatttctagcttcctggtaagctttgatagagggagggctgtagacatctactcaacagtttgcccagaaatttggaaattagattatgttgatttatgactttatgatgctacttagtctactgcaggctgccggtgtgaattgtacaatgtcagccagcttgtaccgcctccaggatgtgacctacaatatcctccaggatgtgacctacaatatatgaaccatgccgggatagagacagcccgattttaaatacgcccctgtcgccctgtagtctgttctaccgagagataccaacaacagcgtttcctcaaatgctagtactagggtggagcccacacccaagtgggaaacagggttacaatgtcaaacagagcctatggagagaggacgtggaacaggggatcgcatgatcgaccgataagaatgccgttcgagcaaagatttaccaatggtagggttcttttgctgcaggggaatataatttacactataaggggcattggaatgcttgtagacacacgagatgccaatctaggggtgaaaaacaaccctcgagccaatgagggcattgtatccctacagaaatgattcagttcccccacagggtgttcctgaatgtacctaggaccctttaaaacaatccagattgctgttgccgtggagttgccccaaaacccgtccaggtgcgcttcaagaggaaaccaccactcatccatttttatctcaaaatatccttttgacgggcacacattcgcccctcgactatttaaataattatattccttattgtgataagtccgagtgatgagactgtcgcggtccgcctggactgggagtgcattccaggttgatacggcattgtttatgtacggcagtgtcccgactgttgccattcccgttgaggcaatcacaacaccagcacccaagaccaaagaaccacgcccagtaaaacgatccaagtctaaacgcaaaagcctgaagaggtcactgtccaagatcttttgatctgcgaactcgatatcctcccttcctagccacatttggctgatcgctatgagtttgcacggacttggagtgattggggcccaggtggccgcatcgatcaaaagcaacgacgagaaaatccctgacacgcccaagttcgcgcccccacgatgctccattacatcctcgcctggggctcacagccaggagtttgatccatcgattggtgcaaagccatgttcgcctttctatcctcattcaagtccaacaatctcacatgaacaactcaccttcgaaacaaagaacgccaatcggagaagccatatgagagatatcgaaagcctgggaccgtacgcgagctgccgaacggatagtccccggcgatcgaagttgtgggaggaagagaacaagccattgacatggctgcagaccctgaccaataaacaacgaatggcactgaaggcagtcgtggctgtggtaacagtggggactatgattgcgatagcattgggcatcactgcggcggtgggaggagcaggatggaaagccagtgctaaaaaaacggcggttggtgtatgagtgagttatctcttcgagtctctttcacctattgggttggatccaccgctgacaggacatgcaacttcaaggttcgacgttacttttgatccggggcgacgagcagcccgatcaccattcattgtgattcacttgccgagctctccgacctaaactaattactcttttctttcttgctgcttgaggatgttatggagaattggagtttaggagcatttgaggttatcgcactcgtccaggggcatgtcacattccgacatgaacaaaatcctacgggtaatgaattggacatgtcatgaactggccggaactgctgtatcatatccttagttatttctttttacccccctattcatttgaatacgacctgtgcatgagttgtcatttgtagctcttgaacttgaaaaatgggagcgaaaacgtaagctaggtcggaccgacctcgggactaagcgggatagtgtaaatccgacccgtgaccccactagcgctataaaagactgcaaacttttcggccccttcttccttttcttttcttcttcatcgaaaaaaagcaactgagcctgccacgaccattgtcctgtcttacgacatccccacgacgatgtgttgccttcggtcctacggacttcggtcttacgggactgatcggctcaggagatagatgatcctcgataggaagttcgtttcccctctgtgtcctcttcagtgagggcggtgggatttgaatgtcgaagacgggacacattccttcgcgtcaactctgttccagtagttgagagcgagagtaacgaccaacgcattgattcatgtgatggtttactattcatagaattacataggagaacggaagatatccaatccaaacaatgcataaatgctaccagtctcagagtcacagtgcaatgttcatgtaatgtcgagtgagctagacctaatactcggtattgacttgacatcactaggaatccatgccatatgctatccggtcgcacggtggtttaaccgaacgaaggacatggacaagatcgtccatatttgagtctgtttgggatgagtcgaacatgactatggcatcaattccgaacgacgagtgcaaatttgtcaatcaaaatgtcccggaccaaccaaggggcttgctcgatctctgaatgcccctacccaggtggtgatctcacccctctcaccctgcggaatgcagtatcaccgcatttttaggggattgcatggcagatgtttacgatctgaccacgatcgaggggtattctcttacttgttggtattattttcattccttacgacattctaatggtattaccctcgccttggcctcatgtcaggatgcagttcctgttgatgcaacggcattcccgcctgcttgttgagctggcgatcatgaatgcgacgaaactactaaaggtgtgaaaatttcctgacgatggattactattcattgcttcaaaggagaatattccatcaatcgagccattcttttatcccgctccagtagcactcgtttccagtcactcttttaactcctacgcgcaagagcatacgtctttttccagtaacatcccccaagcaacgcaatcatgaagggctttatcggtggaatccctgtggcattgctggcagttgctgcccaggccaagtttgctgaacgtgtatgtcatcctactctcaatatgccgatcctccagctaacccaatgtatagcacgagcatgacttccatccccaggctggtgggactgctatcggtggaccttcaggcaatgatgatttccgcccccagactggtgctaccgccgtcaatggacattctggccatggtgacttccatccccaggctggcggtaccgcgatcggtgggccttctgggaatgatggcgacgatggctttgtcagcccctactctgccaatatcaagaccgataccaaggtgaaccagtggaacaaggatgaccactccatcaagctgaagcacaccgatgtgtatccccgccctcccgtggcccctgtgccgtttggccacccgggtgtccccagcggaccccaggtccctggaatgggacctttcggcaagggaaagcgtggtgctccaggtggaactgcaatcggcggcccctcaggcaatgatgagggacagagctttgatatgtctgtgactggtattttcaacaccgaggtcgaggatgtcaacaaggatgatcattccatcgatgtcaagaacaagcatgtccaccctgttgccgttgtgcaccctccccctcaattcaatggaccccctcgtggcggctaccgtggtcctgctggtccgccttccgctggcttcaacactcctccaggggccttcgggaagcgcttcgggcctcctcacgcaggtggcaccgccattggcggcccctctggcaacgatggtggacagagtttcagcgctccgacttacattcagaccgacactaacgtcaaggagcacaacgaggacgaccattctatcaagctgaaacatgaggatatctacccacgtcctcatggccatggcttcgttcccttccgtcgctccgagaaccatggacctcctggtcacggcggggctccacctccgggtcacttcgagcctcacgctgagcctcatttcgagcctcacacggagtctcacttcgagcctcactccgagccccactacgagcctcacccggaacctcacttcgagaatcaccctgagccacacttcgagaaccacccggaacctcactatgcgcctcattacagccccagctatgagcctcactatgagccccacaccacagtggagcatgagcttacttcgttgaaaaataacaacaacggcccctcggctggcagtatcgcttttggtcgccgcgggttccctggcggcccgggtggtcctggtggacctcgtggccctggtnnnnnnnnnnnnnnnnnnnnnnnnnnnnnnnnnnnnnnnnnnnnnnnnnnnnnnnnnnnnnnnnnnnnnnnnnnnnnnnnnnnnnnnnnnnnnnnnnnnnnnnnnnnnnnnnnnnnnnnnnnnnnnnnnnnnnnnnnnnnnnnnnnnnnnnnnnnnnnnnnnnnnnnnnnnnnnnnnnnnnnnnnnnnnnnnnnnnnnnnnnnnnnnnnnnnnnnnnnnnnnnnnnnnnnnnnnnnnnnnnnnnnnnnnnnnnnnnnnnnnnnnnnnnnnnnnnnnnnnnnnnnnnnnnnnnnnnnnnnnnnnnnnnnnnnnnnnnnnnnnnnnnnnnnnnnnnnnnnnnnnnnnnnnnnnnnnnnnnnnnnnnnnnnnnnnnnnnnnnnnnnnnnnnnnnnnnnnnnnnnnnnnnnnnnnnnnnnnnnnnnnnnnnnnnnnnnnnnnnnnnnnnnnnnnnnnnnnnnnnnnnnnnnnnnnnnnnnnnnnnnnnnnnnnnnnnnnnnnnnnnnnnnnnnnnnnnnnnnnnnnnnnnnnnnnnnnnnnnnnnnnnnnnnnnnnnnnnnnnnnnnnnnnnnnnnnnnnnnnnnnnnnnnnnnnnnnnnnnnnnnnnnnnnnnnnnnnnnnnnnnnnnnnnnnngacccaccccgagccccacgttgagaaccaccccgagcctcactacgagcctcactacagccccagctacgagcctcactacgagcctcacactacactcgattatgagttgacttccttgaagaacaacaataatggtccttccgctggaagcatcgcttttggtcgtcgcgcgtatgcccctaccccggagaccagcgttggcggtggtaccgcaatcggagggccttctggcaatgacggtggtagcggtttctccactccgactaacattgatcttaccaccggtgtgaacgagcataacgaggacaaccatgccatcaagggtgacttcacccacgtccaccccgatgctcccgctgagtactcccgtgaggatcatgttgatgctcctgagtgcgctgcccaggtgcacgaggttgttcacaccgtcaccaagacccagtacaagactgctgaggcgacgcacatggcctaccagtcggcgcccgttgtggatactgatccgttctccggctacgctcctcaggagtccttcacccccgttccctacgccgactatccccagcactctgccggagctgacccctacgcctctcccgctcctgctccttccaactttgtttccggccacccttcctaccccgtgcccgcgggtgagtccgtggtccgagcgcatgcgcctatggccacccccgttgcaagttctagcgccgactacgaaaactaccctcagcaccctgtaggggctgatccctacgccgcctcagcttccgccccctacaactatgcttcccagcgtccctcgtactcgaagatcgccgtgcatgttcctatggctacccccgcctccaacgccgcaccgtccaatagcatgggcaagatgatccctactggtgcctccgctgagcagaaggcttctccctcgtcctccgcgtcggcttctgtatctcatggaatcatgttccagggtaacgctgctcgcgtttctggaggcattgtctctgccgctgctgctgttatgggtgtccttgccttcattctatagatcgttggccgtcggtttgagctgcttcgtgcattattagtcctcgtcattcgttattacgcgcttcatgtttccttcaaaccttcattttcgtacaacgttactgtaccttatccattggcccagcctttaatgacgaatatttccttcagaaagccacagatttaccacactcaagcattgactcttggtttctttttccgactcgtagcattcgttctgtaactattagcgaagcccacgcccatgttttgactgaccgattgataagaaaccatctatcaactatagcatttcatgcatgatcagtggaacactcaaccccaacgaacatctcatttgcggttcgtgatcccgaacacctatgtacctatgtaggtagactccaatagtgtgggtcaattcgtcttgataacaagctggcatttgggttcgccactccgaatcctcaagctcaatgacaccaaaacccacctgaacttgaattccaggatattgaccctcaatccaacaatttccggtattgcatattaatcaacggcattttcttaatttatttcttgtatttcttctctgtgcttgataccaacgaccaattaatacccatgtgacatcattgcccatcatctctagatgatctccaaccgttgtgacatcagtacgagtggtacaggacctagcctccagaacaaatataaaagggtaccagtatagtctgatctaattgtatcaaaccacgctactgcaacccaaatacttcattcatccctcgatatctcctccactggacatcaaaccgcttcgaatccaacaatcacttatatctccaaaatggctcagcaaaacccccaccaaggcggtagcctctctgaaatggccgcccaaggcacacgcattcccaacgacgccggcatgatgaataccatcccctcggtgccacgcccagaccagcgcgccgagcatttcggcttcgacaacggaggcatcgccgagccctcaacagcgatggccgctgacaacactaccgacctgccacgctcgacccgggatgtaggtcagaccggcgaggttatcagcggcacaggcaactccatgccggctggcattgaggccaagcatgcctacatgggctccaataaccacgctggccatggtgatactcgcgatctcaaacattccaagtataaccggagtgagtttgagcgctatcaggaggagtagagggtctcgtcaaccattggcgtgacattttcgtttttcaaaatgatggctggcttccttggcctcgtgctatccggtgtatgatgttatgaatggcgtttgtcatatgtaaaacaattcaataccattgaacaaatcccattagactttctgagtagagtgtgctattcaatgattagattcgtagcctgggctggtcaggcccaataaatcctttataaagttcttcgagaacatctcgcttccttttgcgatcggcttgagctgcttgctcggtttcagtaggttcgccgtccggttcgtgagacacccacgtccggatcgttccatcgccgtgcgcagagaacatctctatcccttctccagaggcaccattccctcgccaggcaagatcattgatacgcccagcgctcaaagcactcgaccgaccgcggacattctgtgacccagccatgagacccggcacgcggagacgcttaatgaatgtcccctcgcggagctcgaacatgaaaatctcaccacgatcatcctgctcattgaaattcggccacagtagtgtttcatgccctggattcatggtgcctttcggcactattaacggtgcccgttcagccaggtgcgaagaagagctattacggacccgagggccaaaatgaacaagtgtattggcgcctgttgcggagtcccatactcgaattcgggaatcctgtcctgtcgtcacgatgtgactgccattagaggtccaccgtactccggttacaggcccattgtgggcacgggcatgccgggagaaggctggacgactctcgtatgagaccggtgcagatccagttcctggggccaccagtcccactgggtcgtccatgtctagggtagcgatggcagagttgtgacctccgcgacgcacgtcgaatatgatcactcggttgtcaaccgatgcagaggctaggagatgcggccgatgaggtgcccatgctactgataagactgcgccattgtgtcctggtagaccctgtgtcgatagtccagatcgtaaatctactagccggaccgaccggtcagacgtgcctactgcgacgagcagtgttgacccaggctgagatgagaacgagtgtgaatatggcgtacagtctaggttgaatgtatgtatcggtgtgatagagggcgattgtagcgtcgatagctttaatgtaccatcgtgtgctgtcgagaagatcgtcgatgggacgggatcaaacgggtagatcgacagggaggtaatcgcatgtgtatgcgcgtcggcgtgagaggatttgctaacggacgcgcaggattgatggacgtgttcgagttctgagcctcttgattcaaggtcccagagatgaatcgatgggtcggcacctcccgatatcatactgccctcatgttagattgactgacacccgtcagatgctaagcggtggcacacgcactatcggccctcaaactgatcgacagcgagacagttcacaccggatttgtgagcaaatacctccgctgtggcacctagctcttgatctagaggcgccacatcctcttcggaccggtccgttggcgcagctgctctgcggctggaaaaccgtatgcccggagcgggctcaatgttgtgcactagccgggttgtttgagcaacatggaattcatttggagttacagacccaagggctctgttgagtatataggaattcatgcattcatcagcgctggtgcttttgcatggagaagtcgagagcactcgatggtgctatgcttcaccgggttaaagttgtgccggcgcatttcccgaatttggccgctgaagatcctcgatctttactcctcactatccgctgcacaccactgtttgatttgccaaaccttgattggtcttcctggcaaacctcaagtatgtctgttgctaggtcactcagcttggatgaggacagttctgtcgagcaagtcgaagataggcaagaggcaccgggcgataagccttcgaggcacataaaacgccgcgccaacgtctatgatgcggtagctggtatgttttccgatgcttgccgagcgtgttataccaagcagaaaacatatctaattgcaactaggtcgcgtcaacccccgcggtgtcaacgcacctcgtcacattgcttccctataccgcgacacaacctcatcaagcgttcgaagtttgcgtccagaggagcttctctatcgcaaacagaacattccagtggaatcaatcgaggagaaaacctacttcgcgcatgagaatcttccctctgaccaagctctcccgaactctgagctccttgagacgatacatgcatatgcggccgactactacgaatacgctacggcggacaacggcaaagatgaccatcaaactatggatgagacagcactgcttgcatttgggatcctgatcgaagagatggccaaggaggaactgggtgaaaccggggatctggctctggttgaaggagaagagctgtcggaggaagaggacgataagacgggcctcgagagcgacaccacagctaaatcagcagcaggaaggaaacgatcaaacagtattgtccgtcagagatcaaaaagacgcaagttggctcgttctgattctgttacaaccgatttggacaccgaaattgacgaaagacggtgactggatgacgttgtcagactgcacctatttctccgcggccgaatcctctcggaggcttttgatgcttgcagctgtatcaagctatgcgcgatcttgcatagctacagtaaaacctcttgaaagggaatcggatcaccctatgcactaccatggcacagccacgctgcacatggtatcggcacatatcccatcagcgaggcaaccaaatcagacttcaaagactctgatatgtaagacgatagccttgctgcgcctgcctgtgcgcctcccgctacaccgaatgtctttaatggagctatacacagaatgatagctccgaggagagaacttgcggtggttaaatcggccaatatttagccggctggcaacaatctcgagatccctccctcgtcgaaccaaaataccatcttggttatgccgtgcatcctgcatgagcttcagttcaattatggctgacactggggcgacatctggttgcgagacctcgtttctgtagcaggatcttgtctcacttgacacgtctaacccaagtagggtcttccaggaatggctcttcctagaggttattacgaattttatatagtcctgcgtgaatctagtcttgcgctgactcccaacaaggctatctttagcagcgttagtaatctctatagtcatcattctacaaatgtgttcaagcaaaataaaaatagttgtacagagaaacccttggaatagaaagggtaagcaatgtcaaatgttaagttgagtttccatgtatggtcttccaaccttaggcaggttgtgttgcgtgacaggtaagcctccagttctctcaggtgggctgctgactttgaactcatccatcactgcgcctccaccaatgcttagccatctcatacttgtccaatgagtggacgctggattgataagctttttcgaagttatttgacagtgcgtgaaatatggtacgtggcttttagaatgttccacctggacaaggcccaggaccatttagatgagactactgacgcgccactaggccaaattaaccaaaagcgataaacaggatttgattttgactcatctccgcgccactagaacctgtcatacgcttaaggatctagagaagtcgctaccctcggttgcatccatcaatggtatccaggtcaaggaatacatccaagctttaaccgatgagggtcaactacgagttgagaagatcggcagtgggaactggtactggagtttcagcagtgacgaaaagcacgcacgcgaccgccagttggcccgggtgactgctgaggtggagaaagtccggaagtcttgcgccgatgcagaagcggctttggccgctgaaaccatgcgccgaggggaggagacagatgacgagcacgaacgagaatccctaatggccaaaagaaccgagcttcaggtggtaatcgatcgggtacggactacggaggcccaactctccggacccctcaattcgctcagcagcaagggtgtgaagcaggtccaagaggagttagcggggttccaacagcaggcactgcagtggacagataatatctacatgttagaggagtatttgcgcaaattagtgggcggagatcgacaactcattgaaggtgtcttgcgggaatgttatggagacgagtacgtggacggagagggtcttgctgaactaggataggataaagatttgaggaaaaaagcttaggtttgcttagcacatggcgaccttggggaaattatgtgaaacttgaaaccaattcagtctttagttcttcgtgatcatcatataaatcatcgagaaaaaggagaaataaaactagttgagccactcgggacaccaagagaagcttgaccgtgcgacacgcgaatcgaaagccccgtctagttcgttctccgcctctcggaggcttatcgcgaactcccgaccctctctcctccctcttctctttcttctcttctattgtcacatcttctcttattctccccccctttcgactactataaacccctccgatcgtctatcaaagttggctcctgcgttctcgagtcccacattcctcccgatctcgcgccatctcctgttgcgcctttcaccctctctccccggcccccgacccccccgacccccgttctagactctcgactacagcacagtatcccgcgatactgagccatctgtccctttcaaccctgtcattccccacgaaaaatatccactcctttatcttgcgatctgaccttgcctcctgatacgctgcgagttcttggcgggggtactgtcgaaatcctgcctcgcgcttcgatgtcacaagaaacaatgtggtgcagtggccctctatcataatccccattcctttctttggactcgggaaatctctcgcgcgtggacaaggatacattccgtgggcctttggaaatcagaccgtgtttagtgcattggtcctggacgccagacccttcgaaaggattgatcttccttgtgtcgcttgattggatttcttgacttaggctgagtgcctcctggtctgtttgactattccccgccattccgtactgcagagaataccggcgcgtgtctccgtccgatcggcgccaaatcggtcgcagtttaccatccccaccatccctctcacccctgccacgttttcttgtatagatgcagtaaacattggctgtgtgtcatgtccgccaaccctccaacccaacctacgttgccggccagtcggaatcgcaactctttcctatccaaatttcgctccccgctcggtcaaagaaatcgaggcatcaccgacttctatatcgatccagatgacccatggcgctcttatttccccggtgatgtcatcaaaggtaccgtcgttgtgactgttgtacgacccgttcgcatcacgcatatagtcgtatgtctccacggctatgtcaaggtgttcaagaatgcgattccggcaggagagacaacacccgacttgggattcttaggaccagggcggggtcgacgaggtgcagaatacatgggcaatgggttagcgaccttgttcgaggatgagcttgttctctgtggcgatggacgcttgaaggagggcatctacaagtttcgtttcgaaatggggcttcctccttatgcgcttcctagcagcatcaacgtgcgtttgctgatgcgacctctcatacttaaatatgctaatcaaatgggcaactgcagtttgaacgtggaactatcggctactcgcttacctctacccttacccgaccgactaccatgaaccctaccctcacatgtagaagacgggtcaatcttttggaaaatatcgacatcgcacccttccctgcacccagggctcgcatagttaccttggaaccggtctcgaggcgctcaaaacagaggggaaaagcaaagtcaacaagttcagacgcaaccgcagggccggacacatcctcggtcgatacccctattagtggcgcggcaccctccgtagataccagaccaccgctgagcccctcaccaagcaatgtcagctcatctagccggcctagcgaaagcagtcagagcttccgaatcgccagcgatcccagttcatccgcaagcacgagtggaaaaaatagcgagggtcgcagtgtgaccccatctgtgtccgataaaaccatcaccgcaaaggctgagcttctgcgcgccggcgtgctccccggcgataccctacccatcacagtcacgatcaaccattgtaaacaagtgcgcagtgcgcatggaattatggtcacattataccgtcaaggtcgcattgatcttcatcctgcaattccaatcggtagtacggcggccgggaaaaagccggtatacgaagactgctatccgcggtctcgaacgggacttggaggacttaccttgggaacaagtcggacaagcagcacttttcgtaaagatttgtcgcagacttttgccccgctgatcgttgatccaagcaccatgactgcagttgtaaagacttccattcgaatacccgaagacgcatttccaactatcacgcgagtaccaggagccatgatcaattttcggtactacgtggaggttgtaacggatctacgaggcaaaatcacttcaccagatcgcttcatcccgcgtttcaatatggtctccggtgggactacgttttcacccagcggtcaggcccttaatccagccgattcgaacggcgttactgccaactgggcgggcaatatcttggacacagatgcaatccgccgtgaaaaaggtgtgatctcggtggcctttgaggtcgtggttgggacgcgtgattcacaacgagggaaagcgacgaaacgtacatcatctacagctggcgactcgaccaagtcacaaacggcgcctcctgcatctgcaattctacttaaccctgttgatggggaggagtggccagagatcagtccaatgcctaattcccatggcgattaccatagcgattaccatggtgaatacgggacagaggaggggtatttccccgaggagacggattgggcagagtatcctgaagaatacactgaaaatttccagccaatggaccctatggttgcgcctgcagaagtcgaggagcctgttgacgagaaaacacgggtacgacgtcacgaagaagctctcttacctagtcagccgcctgaggaagatgaggcaggcccatctacagtatcaatggaggtcccgaccgcgccggttttgccagatgatcatcatcttcaagactaccagcatgtgccttcaccagatacaagcggggggccgcatactgttcgctctgcggaatccctgcagactgttgttgcgaacggcgctgggcccagcgagccacgtacttcaggcgatgataaacaagagcttgagcgtcaccgactccagcagcaggcgagtgcaccgcaagacgagcccagtaaccacgaaccttgcgccgggcccagtgcgccagtctttgatgaggatgaccagctagtcggtgggacggcgcatgcagacgagtcgttgcctcggtaccagcgatgatgttgttatgtacatttgcatttacgggatattctggaagataccactattcgcatcatttatgaaacggcgctaaaggcgttgaaatctgtatcatacatttatttgtcaaaatcgattctcaaatctcacataaaatgtttcaatcctctactgtcatcaattgtttggacatccagaattctgtctaggatttgtaaaacgcccttatctcccggctacgggcttggcatccgcttagcgatacctggggtgacttcagcctggcccctggtcaatctccttttccctcacaaaaccccgtctgcttttccaattttcacaatggccttcaaaagcggctcgttcgcgactttcatgattgtctgccgtaagtccatcgcatcgcgagtccccggactccaacggcaaagaggccacgagactgtaataaactaactcagtctgcccaaccagcgacctgtttcttcttgggcattatcttctccctcttcccttacgactacccgatcttgtggtccacagtgttgacacctaccgcacactatgactacctcgaagcgcatctccgcttcctgcacgcctcgcccccgctcatcccacgcatcctgcacatcgtaattttcgtcggcctagccggcctcctcacgaagctctacaagccctccgaatcaaacatgctcttcgacggcgcctcgctggtcctctacatgtgcggcgtgacagtctacatcgccaacatcgtcaagggcctgcgcctcgcctctgccggccggtacggcgccgagctggctacctccaccgacgagaatgagcagatccttggtcgcgaggactcgctcaaggttctttccgctagcaatactattctcgccctcgtcctcgttggcatcctggtcctgcaggctgggcagtggtacgcggagcgcaaggatgcgcaggaagatgaatcgtttgctactagcaagaagactgagaaggagtctggcgatgcgacggccactacttccggtgcgtcgactgcgattgctgggaagtctggtcggcagggaagccagcgtaagaagagcaattaattgatgtctgttcttaattgtttctctttcttccgttcgtctttgccatagggatatggatactaggtgtgaagtggcgcgcctgagtacttgctttgcttggtagctattgttgtctttctagtcgcctacgcagacgggtatttactgtcgcaaagaaaatcattgaagacgtcttttttttttcttaattgccgggggttcaatgtaattcgactttcgtctatgtacatatgatccataaatatagtatggcacgttcacatagcaacaaaataatatatgaaaatgtatgaaaatgtatggatatggcatgatatgcatccgagagtatggacagaacaaaaaagatggacggatgatcatagatgcatgtaatgtggacagatggtatggcaccgcagaaggggaatcattgcgcaggtcgtgaaagatggtgtgtggtatcatatcatgcatgagaaatttaagttcaacggaatgagaatgggctgcgaggcagatccggtgagcgcggactcagtgccttggcgaacaattcttcgccggaatcattgctcggggtgcgcgtgattgaacccatggctgcatccattgctgtaaacccagtgggctcgcttgtctgttgagtctcctggaggaagtcaggcgggaagagtgcaacgggtttcagtgattcggggcccgaaagattaatgtgagagcttggggtaggggtgggattggtgttaggcgttggcatagaatgtaggtggctattagcgatactgctgaacgagctgaaagaggaaactgcaacatcaggcgattgcggggaaagaagcgatgctccgtgagaacctagtcctagtcagtaagcttctgggacatgtaagtcggtgtagaaatacataccacctcctgacagatccttgtcgctggtctgcaacttgagtcccttaagtttgtcactcagattcctgccactgactggtgacaccggtgtggctggatacacggaggatgagttcgcggaatcatggttaccgtcaaccgagtcgacagcacgcgagcctattccaaagttcaactcaatccattccttctcctgaatggccataagcagcgcgattccttcggcgttgttgcgtgattcatcctcaatctccttttcaagaacttgcaggcgcttcttcgcccagatagtatgcaaaacgccctttttgccagctgtgcgtcccgtggcgcccaatgcaggagggaaaatggcggggagaggattaagctggaaggtgtcttggggccttttaggggcaggcacacctgtcggcgagggtttgggttcatacgacagagtgacaatgggaggaatggtagtatagggagggagcaagaagtagcaacggcgtaggctgtcactcggtctttcatcggcgggcatcgtggcggttttgccggcccatgagacatgccacgacccctccatcgcagatcgggtcggatcgtcgtcctcccactcgatcatcaaaattttagtgccatcattagacctgccagcctcgaactcaaatcgagccagcgccattaacgaaaggcccccatccttgaggcctggagaggtttctagctcagcgaattcgctatcaggggtgaacatgggtggtgcttgagccatggcagtggaggctgtcgggcgcgtacttggggaacttgagatccggactagaaaatgcgggtgggctctggcgaaatcacgaggggcgggatgggaaaggaagagtgcgctggacaagatacagacggcggatgggcggagtggggaatgactgggcgggggttgttacgactcggtgatcacgggatcgtaggaagaaagcacctaggcaggtaaactcggtattaattgtcaaaggccttgccgtgtcggggttgctggagtttcatgtattgctgggatgcaaagttggagcagggggtctattggttcctctaattttagaaccgcggcttggcatttatgcaaacatcccagcattgtacaggatggctttgcaacactggattcatctatgtaatgattttcagatgactccagtataatgtttatattattaaggtagtctccaaattctcaacttgttatgatgttgcttggatggtcgtcctccaaaaaccaagttggcaacagactattgtcttttgcttcttcttcttcttcttcttcttcttgtcgaaggaaaagctggaatgccagaaaaaaagagagatgtttggtttgtctttggacaagtctcaatcaaagaagttgccgaagtttaaataaaccgacaactgaacccaaagagattgaaggtataacaattctcttgtatggacttaaactcatgatgtgattgctactgccttataggagcaagaaaaataagcaaaaggacaaacattggcaaggcataaggtgagatctatattgagcggtgatataagttagtatatcataggaagtggataggatggcttagcaacttctttgaccgaggacgacttctaaagatagaaacagaaccgacaacaagtctaaagtacaagcgccaatagtcaaatgtcagatagtgctactgactccaaggtaaacattgagaaagttcatcaaggaatacaatacccacgttttcgtatgaagacaggtccagtatgatacagtatcatacaaataaacaacaagatgaggggatgaggtagcaggccatgaggaacaggcatggatagtgtgaaagccctatgcaaggccgggatcaacaaggttcgtatggggtcgatgggaaaggccatgcagtggcactttgctcaaggcggcaagatatgcgaacagaagcagcatcaagggatattgcgttctaaaattaaccctaagcttgtgatggggagcttcggccttaaaaagagctcaggcggagtgccctgattggcaaggatccaggtatttgcggtcagctgaatcgaagtttggcttcttggtgcgaagtgcatgagggaaataggaaatcggccaaggcttttcgtgattgccgctagatatccttggttgtcggagattcgtatccataaaatgtgtgatcgtcgagagaaacgggcgtctaaggcgacggcgaggttcaaaaatagaagaagtaggcgctactaagagctattattggaagtcggagcatggtctcgatgatgatcagtagagtgcatgaggctctcgtagcttttcattggaagagatatatagttcgtggctaagaaacacggacctggatttacctaggtggagcacaggcagttatggaagccatacagacctgatattaatttgaggaacatatcgttgcttgatctctggttcgaagctttcgagtattgtgagcaactattatagtgtatacacaagatgatcagaatgaaggttgaacgagagcgtggatctgcttgtatatctaatgcgcttgcacctaacatacatcgatattcaagcatactctacacgacgttgggtgctaaaaatatcacatccctgttcatattgagctaaaaaaaaagcaggaaatggaagtggcatcagttctatgaatagaacgcggtggtacagaaatagcacacgggacatcacaccgcataggaatatgcatacccctccttccctcaatgttcctcctgaacatgattggtcttgcatatgatgagccctcgcaagtctaatttgttgtacagcagccacgcaaaatcataagatagggactgtgattatttgcccctctttataatattacgggtgttactcgtggcagggaccgagttcgtaggtaaatggtaatctataccaattttactaggcagtctgtgacttgaactgagtaaatcaagtcctatctggccgactgattagaaacagctcttctttctatttatggataacaatgcttgtacttgcataaaaaagagatcacaccgatttgttgccttggcgcgaagaaaatgtcacctgggtcgaatgttccttgagtgccatgcgagagtcattctcagctaaaaataagccgtcggctcaccacccctgttgaaaagaaatgaccccaacctcatcacatcttctacatacatccgatgtagaccaattagcaaccagccacattagtgcccaagcgctggtggggcaactttgaatccccactgttccattaatttgttgtccaaaataggtatagcgccggcgcttaactgcatttaccacttcagtgcccctccttcattaatatcgctgattggtcagaatgccagggatgtgagcggtatgtcatttttggttctgggtcctgtgtgatgatgcttcgaggaagaaccaatataaacatctaagaggatcaggaaaattaaagatcatattctcgcagagcaaagaaactctatatcttaaaaaacaggagtcatcagtccaatatggaccttcgaatgttgttcgtgtaatttgtagttgttttttcctttcttagcaggtattattggtttgtactactctcccggccacctaggtgttacccatgcctcttttacacgttaaattagagaatgagacattgacggttccatatctcaggggcaaccttaaaacaactaatggattaaagagcaacttgaccccggtcacatttcttcagcgacaacttgaaacacgggaggcactgtatggcccaatcagtggcgttattatcactatcacgccccagtcgtcaacatcacaaatgcatccggtgcttgtgttttccgaatcaaatgggagacctcgtattctgcgtgcttactggacagtttatcaaatgcagagctgtaaactctcgttgactgcatgaatagtgaataaaacgtgtgatcttccgcattagtgtcacgatgtacatttgtgtatgccaatactgccagtacgctgtaatattacttcaagtatgtaattagtattgtaacggattaatcttttgcatgttactcagtattacttgggcatatccgagtagagcgaggagtaataagcaaatcagactaaagcccgatttgatttgactgggccctatcattgtataagattcaatattccctttgtttgaaatgaagccgcatgagctagatctctttcgataacatcgacggacatatgcctgctgtgaatctcggtttacattccaactgtgtagcgtccgatcaatcgagtcaacaaattaagctgtgaaaatccgtatagaatccttcgactaccagatatgttatcggtatactccgtaataatggggccgatggacttgctcagcctcgtccagatcctttgtccaaaaataggaaaccaagcgccactgtagtaagatatgctctatggtgtacatgaaagacgtgcttctcgtgttcacgcaatatcaagacttaggcattggcacccaagaaaagggttggcagtactttcgtatattgaatgaggctcatacagatcgactattgcatgggtgacacgtggtgaaatgcagggtagttgaaatgggagtagcggcacccgagaatatggatagcgccaacacaacgcgcgtgttcaaactgtatctagcaaaattgttgtcgattgttaccggggtcattcgccaaggtctgccatccatgtctctcgtgtggtcaaagcggacgttcgtcgagtatcaccctatcccatcaagaatccagtgctggttaagcagctaaagccggagatttaatacccaattccttgtcccgattggacggtgtctaagtaatgtgacgtgttcaacaattcaagctaatatgacgacacgtcgtaggtagacttgatagactgggggcagagaatgcaattggctcaggaatggtcctgaggtcagtctctacgtagatacgaaggcagagaatggaaagaacctttcagttcagtgagttataatgggaataaattgacgatggtagacagagtaaataatacacaaaataagcttcgactatcaaagcactaaccaggcgcaaagcatcagatgcaattgtcggtgtgaggaagggtcagaaaaaatcgtgttcccaagccaccgcaaaacgtattcttcgaattaccacttgaaaggcaggacgacacggtaccaagaaacataagcaagtaagacaataaagcaccgggcttatagtgtatgatttttgaacaaaagaaaatgcgctctcaacgccgaatccagcccccacgctaaaaccaccgactagcaaaatgcatgaatcaaacagtaaaacccgtaagcccagattgtcagtcgacttccttggcttcgcgacacttgcgccgctttccctttggcggtgcttcaagctgagtgcgcttgtaggtcaccgtgcgcgtgacaacctgcttcacgctgacaggcttcgcactgcggggcgaatcataatagcgtagcgtccagtctgacggcgagaatggcgaccgaagagtcgttgcactccggggtgttgcgctccggggtattgcgctccggggtgagtccgcgttcggcgagaacttcagcgacgactggatacgaagtcggcgaccatggaaattctttctggatggtgccgctgagtttggggtcggtggtggcagagatatagtcggcgatctgaccgaatcgctaaatgtagactcactgattgcgctcgcgggttgagaggtgggcgatgtagcagtggaggggttgtcaccaatgtacttgggaaaaccgagactagcactcatagggccggtgaagacgggtgtgagagccttgaggaaatccgtgtatgctgctggaggtgtgataggagtcgattgatcctcctgcttgatgtagtcggaaacactggatgtagagccattgtgaagttgcgatgggtaaaccgcgctctttggcgtcttgagaggaggaagaatgggtttgacgttcggcatcttgaccaggtcacaaagattttgagaaaccaagttctttcgaaagatgtgtgagagcaaaaaaaggtgggctgaagtaggtagagagagatgtgatggggtaaggccgcgggtgaagtagttgaaatagagcagacaagtcagggaagatgataatagaaatataagaccaaaaaaggacaatgcttgaagtaatagcagagagaccaagaatataagaaagtgctagccagcagcgaaacgaaaaggatgcggagagactgttttatgtatctgagcaaggcagatagatgatcctggtattggggcgatacaggtaatttcacgtttgggactgtaaaataacgaggctgtaatatttggtggtaagttaccaaggcggaacaagggttcgaggccggacgggcagtcccagtgtggcagtgacttactatttgtgtgccgtcttaacgaggtccgaagaggatatcggcaatgtttgccaaagacaaattcaaggttgttttgttctcttgaaaatcgatgcaaagacggcaaccaaaaaaaaaaaattaagacttgaccgtcaaggtcaagaaacaagaaaatattcaggtgaactaaaagattgtgaaggatatctggggatcaaaccagcaccatgctttggtctttataactttctgtcttgctgttcctcggaccttctcctctatacccgctgcagaaatgcaaaatgcaggagcatcgctgacgcgcgccatctgaatcaaaagaccccttatgccatgtatcaggagccgccgcagagggcggttgttgtcctaggtgatgagctgcccttcaagccactgtttatcctgtactacgctctggttcgtccagttttgacgcgcgcagcttgcagctctgctggcggctcgctttaaggggtatctcgggttgagaattgaagacatcctattttgtctccagtatagtgcgctaaccgaaacaaccccttagttttgttgtgttttgagctggacgatcaagcagagaccctagtttgacattgagatttgaactctcggtccaatcattcatgtgttttaccagctctccaaagaaggttcctgtctccacagttcttcagcagctgcacgatattaataacctcgatcacttctatggggtgctatatctattaaaggggcattgtttacatttggcctactaacttgttgccaggggaagctccggacaacgaactcctctcggcggatacgtggtcacgtcttcaaaagatgtgaattgggttggtacatacgatgattctaatatctggcgctgatagtaaaggaattcaagacgttcaagcctcaaactccgtgtctatgtactttctcgccaaggtcttgggttggattgaaaagacgatgttgtgcatctattcatcactcgtccaaaataacagcaaactgtcggttggaacgactgatgaaacgacgtttcctttctttcttgctaattgagcccacgccctataacttttcctcattaccgctgtggcattctcgcaaaagggaaggttggacttcttccttgatttacctatgttggtgaaacaatacgcgctttgcttcgtggataaaccaagagataactttgaaatcaacactgcaatatcattgtgcaggatccgaaacgatcaatattattttagttaattggctttacccttcatgcgtattgtcagtcagtgtagtagttagtgcattttagggtttcaaacatcgatgcgccctctccttcaaatatcaaagtccatactgagtttctacaaattggagaaaaaggtgaacttcgactgatacccacccggcagacaaaatgtctcagctcttgttatgctccgagagaaagctgcatacttagctcctcaggaaatgatcaagagtagttgagcaaatatctgccagctctaacctggaaatttttaacaggctttgcagtttgcagtctagtgtttggtctctaatattccagactaactactacctacatataggtatgtcttctgcgaagtgggtttaccaagctacaatgcactgagacatgcgagaagtaatattgatatgatatattttggattctgaccaaaatttgaaatatatacagacccaaatcaatgccacgtattgcgtccagaataagacgagaaaaaaacaccagcctatacatgataaacagaacataaagcaagattccagacaacaaattcgtttgcacacaaaacaataaagactagtcgcgaagtggggtatcttttaccatctgagccagcacggggatcaacctcgtgaaagatagaatcaaaaacaaaaagaagacatgctcctcaaataagtaggtagttccaattattccgcttcatgatgtccctccagtggacttgttgcttcttgatttcccgtccacccatagtggcgccagcgccagaggtggagttcgagttgtcaagcctggaaatcggactagtaagcgaggagttgtaggggttctctccagacgagatctgagaggagttgtaagggtcgtccgtcacacgccacacctcatgcaggaggcggtacatgcgtccgaagctaccgaggtccccatggtcacccagcgcagtagcgcgatcggcgatcacggatcggaaggggctcgatgatttggaaaacaagccggtcataagcagtggccagacaagagagcgatcgtagccatggggaccggcaggaatgaatcggagcgcgtctattactgcagcgatcaagctctcgtctacttggttggtatcaaagccaggtgcgatgctagaaagatagatttgagctgcgatccggaagatgtgagtcatggtctttgtcagggcttcagggcgaatggctccagttgcaggtgagaatgcgttctccagcgtgggatcggcgggctttgtgtgctcgagttgttccgccagcgctttactatgataagagacagccgagtcaccgatgcgaccttcgctcttaagagagtctaggcaagcaatctcagagatgagatacatgacgcggtcatcgcatcccatcaattcgcataagccagaggatgctccactcaggtgctttgatcgatactgatgagcaaattcgggagtcttgcccaccattgtcgagccaaggatatcaatccaagaagttaagctcatactaaatggggcgactaggtatccgccagagtgcttaactgttgcagaaggaagttcgagtctggccacaagatttgatgcagcttggaaatgatcaaaccacggaatatcagggaggtagtcatccgaagggccaacagcgcagtgaaagaagatcatggcaagggtcgcatccaggatctcgttgtgattaacatcttctcccagagcctcacatagtttagagatggcttcaaaacggtgccgcatgatatcatggtcaatttgctcaccgaccaatccttccgtagtcttaaggtggatggcagcgacactcagacaacagtgaagatagcacttatttgtctccagagcgcggagaattgattgcgcgcgcaagtgtcccttttggtgagtttctagaacggggaaaatctggcgtagcacattttggataaagtgatcgagaagtggccgatcatgatcgctgatagcaatattgctttgtaaaaatgcgcatgtgtgatcaaggctagggttgatacctcgcgtattggcaccatttgaggcctgagcgaaatattcatcttcaaaccattcatcaccagaaaaagttggcattggagcactgatttggggaggtgcaaatgcactgaatgtcgatgtcgaagtatcatgacgcataggcacatcgttgataaatgtctgccgttcggttcgcacatcgacctcataggaaggtacgtaaggtccacgaggagcacttcctagcccaggagtaggcagctgggatgagaaaagatcgtaggactcgttgtgcctggggcgaccatgttcgtgcacaggtgaaattggcgatcccgcagacatatggcgatgacgatttattgggtctagagtgtcctagatgtcagttgaaaatgtacgcgaagtatgaaccgaataagcacataccacagcggataccgtttcgctccagcgtcttggtttccttgatcctgttcttgatgcgctccctgtgggctctccgtttctccgcatttgcccaccagaccgggagtttgtattcgcatcgcacattaagactgacacaggcgctgcaggcagggtgtttctcgtcgcacttcttccgacgtaggcggcatgtgaagcagcctatttgaattagtatagttcataggaatgacttttttagggacagtgcgcaaagataagagcggatcacataccagaccgggatcgcttgtgtaaacgaccatttgctctatctccatgtgtgtgaggtgtgcacggagtcagtgacatatctgccgaagcaagaggcctagtagcagaggcagaggcagaggagttctttgagatcggcatattgaaatattgaaattagatgaccgcagaatgatcgatgacagtaattgtgtaatcaaaagaccagaatcaattgcagataaaaagagtatggcaaagctgaaccagcaggctttgtagtctatcaagatataaagaaaggaaagggaggttgaccgagcaactgtgagaaagatgatgaagatgaggaactaaaaccgtgggatttacgatgctttaaaaccgatgatagcttgtggaaagagaagcgggtgtttctattttagaatccacctgcacagttcatagattgagttggataatttgggggtcatcagcacgagttggggttggatcgtcgccgaatattgctgggctgggaagccaacaggtataagcaaccaatgagagttgcagaaaggatgataaaggttgcactcccgtcttttgagactaaatttgggacaattagctctgttatttttgtgacttgaggtcgcatggtggcgttagcgcatgcacctcgacgtccaagttcctcgagggactggatggagatcgtccggtcggactgcgattccgtgctctctcctccgtaacatgggtggctgcatatagctcattggacctggattgatttcgatcttcgggttggtttttagttcctttccactatgcaatagtcggactccaacccaacagtcagagttggtgttggcattcgaatccttttacacaaccaactgagggatttaacaaatttaatacgttaagcctacgcatagtggatgccgctgtcaaaatcgcttgacctgcaaggaacgaaggcggggtcgagatgtgacgagcaacaacagagccgggataagtttcgttaagttactaaattcagaaatatgtcgcaaaatttcggacaaatttagtacagtctggcccgcggcattcaccataaccaatggttgagatcaatcatctctagaaggctggtagatcacgacttgaactgaaggattatgagtagtgtgacagtataggtggagcaagccaagctttcagttctcgcatcataattggatcaagagactagaattataaaattgcccactgctcgaccggggccattgagagctctgactgggtggctggggtatagcgtcccacgtctggtgctccgtgcagatttgggggatgtgatgtgatagacgtgcatatatagtcccttaattagcaacacttaaccgcccagcttcggcacaatgcaaggtaatttaccccatcctgtagtttattctatcttcatttttggtcaaattaaccttgagcatctacttttcaatagatttactattaataaccttcaacggagatcgagttgagtcctaaaataagacaattaatctaatatcgagcttcaattggtatagcctttacacttcgtcaaaccccgctcaaactgctagaatgcctgtcgcttttcttcccttgtgtacgaccaatttcccattagcaacggcccactgcagatttggctctcgattggccatcgttacttaccagcagagttaataataattgatcaatctattaccgcatccaacccaattttagccattcaaccctcggcctgttggaaaatttcgatctacacatccacacgttcaaagtataaacgcacaatgaggaaattcctcgtgccttctcaacctattgtaaaccaaatcaaaatttccctggtccacttgcggctttattcatcgagaaataacgatatcgagtaggtgatgtagttaacgatctgtactcgtacggagtatatgcttagttatttgctagtactccgaccgaatgttgaccgcgcatcatccatcgttcaaaccctaggtagttgctggtcgcgaaaatatatcaagagaaatgatgcctcgcatcttgatgtcggcttccgttctcctagggtacctagataaggactgcaggtatagccatccttctttgtcattctattctacatattgaggcttcggagatatatctatcagccgtgatggtatatgtgccatgttattctcaattgcgaataatcccttgaaattcggtcttgcaatgttgtttccaagataaagcccaaagccctactccgtacctttagactatcctatgttacacaaccacagaagaaagtaccacatccgacaaattggaaataaacacggtacgggatacctatctgtagctatccggttattttctaggctgccatttcatatttgctgcaactgaagtcttatacagatacttgaattcctaaattctcatattgtatgtggcgcatcgggttagccgtcataattttatactctatggagccgaaagcaatgcgttgagtttatgaaatctttgacggtgggaattaggcgagtctaaaatacataaatgaaacctctcatctcagatcaaaataataaaagttatgatatggagtgtgttttcctagttaaatctggcaatttatggtgttgatctcttccacatgaacaactgcagctaatttatcaatgcgtcgagaaatatgcagcacatggcacatcccaaccccaccctagcttacctacaatacggcggtgaaagaatccaaagactggaaaaattcagaaatcggccagcagcattccattcccattagactgcccgccctcccagggttagtatcctcatagtgtgtttgaagtgcctgtcaacacatcctccagaaagggcacaagtttaacatcattgtatccgtacacagatcattcgattagcccccaaggttcatatcatatcaacgaataataagacgaacgtaagaaaaacatgtgctatccaagccaccaagctactaactagtctataatcaaaaaatgaaaccgggcatatttttaagtattggtaacggagcgccgttggcaacggagaccctggcaacgtggagaaaaaaagacaggggcatcactcgaggaatggggatcgcaattaaatatagtaaccccgagtgaaagttcaccttccaagaaaatggcgtagcgctaactgagggttgatgcgtggtcgtcacgctgcgtcgggttcctataggtgcgaagtgggggaggggttgcctgcataggcgctaactgcacaccagtcacatcttcactccaacgtcgacaacgtgatcactttagagaaatgcgcatccttcaagccaattaatgtttaagcttgggccgccttatttggcaagaattgcagtgatgggttataattgggcgatgctaatgcgaggtgcttgcatctgaagcggaactactgcaggtgaatcacctcgtatcacaatcacatatgcccttaatccctgctcttagccaatcgcctccgctgtctgctaccgaattttagttacgcgctgagtttcaccaacttggtatgacacggaatttttgtcccgttgagcggttcgggttggctagatcctttccccagcgctacgtggtaaatgatttcttagcacaaagggcagacttattacagcccaactgccccgatgtgacgaacttctgttggatctccgctcatattgagtctattttctatctccatactttcatttcatcatattgttagttcactgctgtgcgggaactctaataacaccacattcatttaattatactactatatcttgcaaattaccatactcacgattaacgacatggtaagctggaatcctaggaaaatgatatgatcgctgttaaccattccagaatatgaactcatcactggctgctcggcgaagagtagtacctgctgaggtagacacgacaaatcatgagtggttctatcccaaaaagaccgtcgagaaacagcgccccaactcaggggcaaccttcttcgatgacacggattctgagagtggtgactggcgccaatcgcaccggcagagtatgcaatcggtaagtgtccttatccttgtatcaaaatatgaagtctaatgtagtatgaaccaaccagtacagtaacgggagcaacactaccctttcgagccctgagctacccactccagacctcctgccaagaaacctgcctacctttcgatcaagtaaggaactgattgcgggcccttcaggtcctgatttgttcagaggatccaggggttcgactgtggatgttgaattctatcttgaaccgtcaccttcgctcgatttcaagtcacttacacagcctgagtttgtcaacccgcatcaggctgagttcgtcaaccaataccaggccgagttcgtcaagtaccaggacgagcgccccaaccagtaccagcctgagcgctccaaccagtatcagcctgagttcgtcaaccaataccaggatgagcgccccaaccagtatcagcctgagcgccccaaccagtatcagcctgagcgctccaaccagtatcagcctgagttcgtcaaccagtaccaggatgagcgccccaatcagtaccagcctgagcgctctaataagtaccaggctggtcgctccaacccttatctgttatctcctaagacaccaaaggcttttccacgcaaccccgatgtgtctcatctatcaaagaaggagattaggaactgggatcctagccaggtcgctcactggctatttatcggtggatatcccgatgatatccgtgacacgttcctcaaaaatgatatcaccggcgacattctaatgaccttgacaaaggatgaactcgagtaccaactccgaatccaatctatgggcagacgtgtccagctcatccaatcgattgattatctcctcgagaacatgcagacgagaccgattccagaaacaccgtctcagtttccgtccgaggcggcgtcttctaacgggagaagatcccccgaatcgttcgccccccaggaattggctcctaaaagaacccctacaggccaatcttatacaatgtctatttcgcctgacggtaaaattctctcttcgcatgcctttggacagagtggggatcaaagcaccgcagacgcagagtctgtatcgattgttggaatcgaggaatttcatccgaagccccacaggtgctccaaaggagagaaatgcagcaagttcaagaagctcaaggagaagcgcctgaagaagcttactacagagtatcccggcgcagattttcaggggggtgctatctttgtaggcagccccggaaatcctgaaaccgcgagaaatcttctccggcccacgtccgaggccgagctttcagcgatggcatcctcaaatatctttggtcctcggtccggaccaagactctctgaggcagctctgagcgaagttcaacgcttagatccacaagaaacaatccgaaactttctcaggcaccagcatatcgatgacttccccaagcctggaccccttgggctggacacttacaatcttccgccggcagacgactttgaggacatctccccgctgaatgcccagtcaaattctatggccgcaaatctgcgcagtcttccgaggcttacgataccaacaagcccgctcacggaagatatgacaaccgctgttaccaccaacagatacttcactcctactcatcagaatggctctcctactgctgttcagcaatttggccctttcagtcaggttcatcaagcccaagcaactgagacctaccgccaaggtacaccattctccgaagttgatgtccctatcactgcaatccccagtgatccgatatcccgtgatgtgtctcaatctgttcccccaagtatgcaatatggaaccttgttccctccgtaccgagatgccaatcacctctcacggagcaactcgacccgtcccagtgatgatctccctctccgtgatgccaactattttgcacggagcacttcgacacgtcctcgcgatgctttccctctccggcaggtgaacgagggcaagcctctgaccccgatcgatgttcccgcagacctgatccgaagcccccgcgtgaaccagtatggtaacagcagctcgctagctctggccgatccggaagttacccatgcgggatacatgaaaaagcgcaagaccacacgtctgctcagacacgagtggtccgacgcacacttcacgctccgtggcaccaacctggccatgcacaaggacgagcgtgatgcgcaccgcatttcgagggccctggaaaacattgaggtcgacgaatatgccgtcgcttgctcgtcgctggcgacaagctccaagctgacggctgcgttcaagcgctcgatcttacgtaacggaaacagtaccactgacattcgtgatggtaccgcttttgctttctcgcttattccagctacaaaggagagtgagaaaaaggctctgtttggaaacagcgctgttaaaacccaccacttcgctgtcaagtctcgtgaggagcgcatcgactggatgcgtgagcttatgcttgccagggccctgaagaagggtagagacggcgaggatggcacgtctatggatgggaatatgatttgagtgtttagattagtggtcttgttgcttccagctctttgcatatgtatacgcttacaattcgtttggtgttctttgatttttggtgtgctgcggtcccaccatcgctgaaggaactacctaggtatcattgctctggcgcttttgttggtacatatttatttcctgtgtcacccccttggacaaattcatgaaacgcgtcgccgtgagacggtcagactgataccccttgattagtatagttgcgtttagttacagaagaggtagttaaggaattcaaattgttaatgtgcgaatcttatttttcctttataacatacaatcttccttgattttgtaaacgtacccaactcccagctctccgcggctcactcatatatatcttcttttgcctgaacattgccgctggaggtgtttctcaatatcatttgtaaagaagcagaaggaataacctttatttgagtctactctactagcctacagttgaatatggttcatctctatcttgcaaagttgttagcgtcctccgaggacagtgtagacatatattccgtgcttggtgatgctatatcatcccatcatccgaacgactagatacgcccacccatctccataagcagagcttctcacaacctcttcgatcggagcagacatgggtatcacagcaccgtgtagcacgggctttgcaaggacaggggttctccgactgggaaacagattcggtagcaatgtgtgtaaaacagtcccaaccgtttgaggctggagagtggaaccgctccgcgagctcaacatttgacttgactgcatactgggtgctggtatggaaggaggaagtggcgattgtaccactttaagggagggagactcggcatttagcgggagtggtagaaagatccggatcggaacgttgcgaaaaggttgtgagtgacggggaagaaggatatttgatatgcgctgaaaggaaagaagatcgactatgtttcttcgtgttaggattgtctctatgattaatgcagcagagaaggttctacacagaatgtttgactcacgttcttgaacggcattccaaagtcccgatgagtcttcttttgagagactcatgatgcccttagctgtaccatttcgtaggaaatctgcttccttcacactgtttataaaggcatcgttcatgaccattccatcggcatcaagtcgaacaaggtcatgcggccagttggtaaagtgcactatcagacgccaaggcagcggtggcccgtggtcagtggactcattgtctcttgtggcggtcttggaggccgggtctgctcccgcatagaggtcaaataacagcccgactgggtagtgccacttcagaggcacaccctcaaactcaaaccagccatcatgagactgggagtttggctctatcaaaaaattcgagaagaaagctagaagcctaggtagcaacgagggaagatatgagatgcgcggatatgagatctaggaactgagatcagcatttgtgcttatcaagtgcttgaagaacagacatacaagatatggatccgtcttatcaaaggttcgactttctgatgaggctagaacaatctgcagtggcaagcgcccgtcccagacggccttctggatagatccgagagacactcggttctccatcctgaggagtgataaggcgctcggttctttcttcaatgtttgctttgctgctggtttgtcaaaacatggttagctcatatagctatttacaacctataaaaacatacttgatcttcacacgccgtatttctgattactacacgcgctgggattcgcatgtcttcaaccgataagactcgcggatttggaaatgccccgctttcgaaatggtcatgatccgggaaacggcgtatccacaaaattccagagatagtcggccactcttgggaaatcaagcgtttgattccaaggagatactggcggttcgtgttgacatagcgtgacttgaagacgcgccaaaggttgatggcacgtctttctgcctcaggcaataatcccaatatctatgcctcaggcttcacaggttttgatttccaaccttccaacattaaagcagcaataacttttggccaatacatatgcaacctaatgatgcgatggaattcaaggcaagcggatcttgcaggatactggtatcctccagattctggatattcaagcgcaactttgtgtatcttcgttgaccatcaaggtccttgatgaactttctagatttatctacatcttcttttgtgcgtctgtacaccaaatatttctgcacgtcaaaaggcttaagatcacgtcggcattaaatgcagtcgtggcgcgttgttcgcatttcttgcccagctctggtgcctcattttattgacatggccccaataaaaactgcccatccataatctacaggcacgacagcagcggaatacaattgaatcgcctcgccaagtgtttttccgtccgccgtgctttgcagccgctttatattcttggtctcacctaaattcgaaagcttcttggcatgatgttcctaccgatggagcagtgagttctagccatggaagcatactccgtaactgctaacaagcgatcaagagaccaatactaggagcagacccaggctgcgcacgttttagtgacatcgatctacaagtattggtgcaagccgtgccaagattgcgttgaaaggaaaatcgtaaagccgagaagtcttagaactgccgccacggatggccgaagactatcccgaggtgccactcatgtagcttccataccacctcgagactcggcctcgcagccgacaggaggaaactccgccactttcctctggaagctgctcccaacagggcatgcaatatgaaaggattcgagtgtagggctgctagaaactccaaggctggggctttttttgcgctgttgtaaggggcctccaatttctgcaagatcggccaaatttagccttgtccccgcaatctatgatacacaatacgtattcatcccccacgccgcgtattcgcctgtaggttctatggcgaagactgcatttgtggatattttggctcaagaaagacgggtactcgcaagcgcagagaaaatcctattggatattcaccaaagtcaccgagaaaactatgaattcagaagcacaatttcttcaaggcccataggataaacgctgataggttgtgacaggttagtgccaataagtccttcactctaaaatttggcttgtatgactcttaggtaaaggcgactcgccattcaacctcaatttcaatagtgcattcttgaataccaaggccgggcggcagccacggcgtccttccaagccggaatcgggccgaaaagagcttgtatagttctgatcatttaaacaccacggcaacaacatcaggatcatatagtaaccgtgtaactttattggatgagcacattgactcatgtatctatttgtaatccgggcccgaccgccatgtcaaccccggagttccgtttagtgtaaatgtcattcaccccaatgcactatcccgggcggggcctattccgccattcctgggggatcttatgggagatttcaggtagggacaagtaatgatacaacttgaaggattcccccataagcatacatactaggatgtacatgccagtcaaaaattcctccttcttctatagttattcctactccgtagccttactccgtgtttcggttaatgacccgaaatcaaatagacttttaccccttcttccgtttgccgtcggtgtacctcgctattcggacatgtacggtattcgggagctcggcaaaactccgcggctccactggtggttaagggttctcccctataggcgaatgaacgtttttgcatagaacatttggggaaaacaaatcacggggtaatcactcaacaagcgggacttcgctgtgccagtctcccccacactactacagttcgcactccagttcccctcaaactggagacagtaatccgtcacggcctcaccggagcccccatgcgataaaacatatacatacctactcggacggctaaacgtaaaactcttatccggtgtggaagcaaaagtactgtcacaggtatgtctaccatctactgcacccaatagaaaactcttgaacaggaggaaataagaaatttccggtgagctcttccagtttgatatacctcaaaatactataaaaggcttatttgccggctgaatgtttcctccggggaaaacgctaccccggccaatgttcccactcatagcatcttcatgcagctgtaatcatcgccgtagcgtagcctcacgctcgaaccccatattatattgccccagtctatggggttttaggcgacatatgttgtggggagcttagttggggaaatttccacacccacagtccattagaatagcgggtattacttagggccacgttttagcaccccttgactcttcttcctccatctgtcttcgagcaaaatctttctggttttctcaccctgaccttcacttctacctcgcacgcacagctcgagctgtcacctcttcagctatgggcattctcacacttgctgaggatcggccaacgcccaagtccgtttacaactggcgtgtatatgcactcgccgtcattgcatcatgtggttccaatatgatcggctataccagtgccttcatcggtacgactatcacactctcctccttcatgaaggaattcggcctcgacgagatgtcttccacacaaaggagtctgattagcgagaacatcgtctcacttttcattgctggtgcctttttcggtgccctgggaacatatgccctaggccacttcatcggccgaaaatggagtttggctgttgctgccacggtattctttctcggagctggactacaactcggtgctaacagtgcccgggggctgggtatcctctacgctggtcgtgtgctgtccggtttgggtaccggtgtagcctcgaatatcattcccatatatctttccgaactagcgccccctgcaatccgaggacggctcgtcggtctatatgagcttggctggcagataggcggaatgttagggttttggattaatgtgagtctccctgtctctcgttgatcttttttttccccgtgttatctttgcattcaaagctaacctagatatggtagtatggtgttgagcaacacatgcctgaagtccacgagcaatggatcattccctttgctatccagctcgtcccctccggtctgcttttcataggtgccttgtggatcaaagaatcccctcgttggctatttctcaaggaccgtcgccgcgaagcgatgaaaaatctttgctggatccgccaattggaggccgatgacatgtacatcaccgaagaggtggctgcgatcgatcaggctcttgagcatcagaagacttccatcggtattggcttctggaagcccttccaagctctcgctactaacaagagcgtcatgtaccgtcttatgctgggctgcatgctcttcttctggcaaaacggctccgggatcaatgccatcaactattactcccctaccattttcaaatcggtatgattgcgcctcatcagatgcatttctgataatcaattacttatgctaactcatgtttcttagatcggtgtcgacccgaataccgttaacctgatgaccggtatcttcggtgtcattaaggcggttatgaccttcgtgtggctcctgttcctggtcgaccaattcggaaggcgcaatctgctccttgttggtgctgtgactggatcgatctgtatgtgggtcatcggtgcctatatctgtgttgtcaagcccgaagataatgtcgccacgtctctgaacggcggaggcattgcggccatattcttcttctacctgtggactgcggtttacacccctacctggaatggtaccccttgggttatcaattccgtaagtcgctgcttattaccattctcaattaaacattttcctgaccatttattaggaattcttcgaccccaacttccgttccctggctcaggctgccacgactgcgagcaactggctctttaacttcctcgtctctcgcttcaccgaacagatgttcgccacgatgcactacggcgtgtacttcttcttcgcttcactgtcattcttggcattcttcttcgcgtttttcctcatccctgagaccagtggtgttcctcttgagaaggtcgaccgcctgttcgattgcaagcccgtctggagagcgaacaagatactcaaggccgcccttgcggaagaggaggagcagttccgctacgaggtcaaggaggcatcgtaccatgaggaaaacactggttcgatagctcctacgccttgagatgaggagagacaaatatgagcgatacagttacgaagagatatatagagctagtcaaaccttgtacagatgatcacgatgtatagacgctgaatagattatcatagacttatttttcaattgcccaaaactatacagtatgcttgaccaagagtttggagttttgggtaatggcagcccgggccagcaaaaacaccggagccgcagcgtagatcaggtcccccccccccccccccgcccctccgcaactcaccccannnnnnnnnnnnnnnnnnnnnnnnnnnnnnnnnnnnnnnnnnnnnnnnnnnnnnnnnnnnnnnnnnnnnnnnnnnnnnnnnnnnnnnnnaccccggggccgccgcggaggtcagggccccccccccccccggtgtttcaataactccaaagttcggatattattattctagttctctagttattactatacataatcgcgtctttaaaagcaaaaaaaccaggtttgacgactggggaagcgcataactgtggacattaggagctcaccatcacctagctttggccacttaggttcttaataatgaatttataagtatgtaatcccaggcataatataacacgcaatatacggtgtgagctcagactcatccacaagcaaactcctgcgccgtctgggcagtagcgagaaaccaaagcgcgctggttgcgaccacactcatttcgctgtatgctcgcgtggggataaacacagttcaaatggagttggtttgacgagaagacgaagaatgaatggaagagatttatgacagacatagaacacactcattgctaacatcatgcataatgattttgtggattggtgattcctggttcccttggccgatgacaggtctgatagcatgcatagtgagttgggcaatccctatttacatatatgatatcatctggcatatatagctctgtagatcgtttgctgatgaacattacgatcgctgcggttcattctcgattccagggttgtggctagtgcctacgtcatgccacgagatgggccctgcagggtatagatcagcactgatattgaagatgaaggagatgtgtcgggcacagtgggagttggtggttcttgatttcttcaattcataactagttatttgaagttgtcgctaatgacgatcttgttgcagtgcattttttttaatatgcttcacaaagttgtacacagcacacagccaggtttgcatattcaagtagtacaaaggcgcgaggggtcgcagatttgtcagctggtaagtctgattgatcaggcgaatatccaagacccttctccgtgtggctggattatttgaagctggcgatgtgtggaaagtgattgaaatccggggcacaaatacagtatatgtggcctaaaacatacccaatcagtcgtcgcaatcccagcagagtgtcctactccataaccttgctaaaaatgatgaacggggtactccgtacggagtagctccagatcataaaatcccaatcggcaatgaacgtgattaaggtgagaacattgcgattggttggacattgccaccagttttacattgtccaatgagagacatgggtctcaaaacgcgatcgttccaaggtcgacgcattctaaatttaggggaaccagatcctttgaggctttctaaaaatggcagggatcggctgataatctggaagccgacggaaaaagactagatgaacactatattgtatagactcaaagccaaagcgttcctttagagtatgttaactgtaactaccggtctaaaggcagaagaaggttaggtaatgttgacctcgagagtgcgcgagatggctgcttgcggaactagtttggccggtggcggcctagagttttttttcatgttacgttggctgattcctaagcctaggaaaaagcgagaataagccgaaataaagattttcactacggagtctacggagtttacggagtaggaatcggcaggatcgtctagggtcttgggggggttggggcagtgtagaggggcaaaaggctgggatgaccaaggtagctggggaccgtagttgatcatgactccaatgtacggggtaactacattatacagctaatagtaaagccaagtttaactgtttaatgaatgtcggttgcctgagagtggcttcactgcacgaccctggacgatctttttggctccactgagcgcttacgtcgtactgtggagttcaatgatatcaggaaaatcgaggaaaagaaaaagaaacgaaattcccattttctcttttcaacatacactcgttttgtcgccatgcaactgaatggctcccttttcggagctctcatcctcgtcctccagagtcttcagcttgtacaagcagagaacctcatccaagccaccgggctgacacaatgttccgatagtgccgaagtgaccgtcaataacttcaatgcgatattcacgccaaacaacaagtccatcagcatcatctttgatggctattccgaagtggccggagatgtgctcattgacgtggacctcctggtgtacggatacaaggcgtttaccaagtcgttcgatccatgcagtctcgatttgtcggtgttttgtcctatgaaagcaattgaactgcaaattcccaaaatcacccaaacattgggcgacagtgtcctctcgcaaataccatgttcgtccacacttccccgatagtcgcaaattctttcagggctcggagactccggaaattggtcttactaacggttacgtcatagcgatcgcctatagcgtccccgacatcgatgcagtgattcggctcaggctcaaatacaaaaattcaggtaaacagatcacttgtttggagacccgtgtccgcaatgggaaaacagtctaccagcgtggtgtgtcgtggacactcgctgtcatcaccggtcttggtctcatcatgtccacggtcatatcgcttctcggccattcgaacacggctacccatctcgtcttccgatcgcttgcattcctcggattcattcaaacacaggcgatggttgggatgtgttcaatggcattgccgccgtttgtgcaatcctggactcagaacatgcaatggagcttaggaattgtgcagctggatgctctgcagacaattgcgacctggtttcagcgcgccaccgggggtacaccttcgaccgtgcttgaatcggcgagtactgcatctgtcgtcttacagaagcgttccgccgggatccatcgcagagccgcagaggaaggaactcaaattcttcttcgcggtattaaacgggttggaattcgcgaaaacatcgaactgagcaacatctttatgaccggatatctattctattacttcgtcaccgcagtcatcgtcatctgtgtagggttggttctcctagtccggggtgttttagccaagaaacagacaatgcttccaaagttggatcgtgccatcagtgtcaccgcagattggaaaaccatcctccgcaataccttcttccggctggcatgcatcggatacccacagatgtgtatcctatgtctctgggaactgactcgtcacgactcagccgctgaaattgtcctggccattaccatgtggctggtcacgactgccgtcttagcctttgccacattcaaggtgttccaacgcgcgatacggtcgaaacagcagcacaacacacctgcgtacacgctctactccgacccggccactctgaaccagtggggtttcctatacatctactatcgcgctccggtctattacttcattgtcccagctctggtttacatcattgttaaaggaatggttattgccttcgctcagccttcaccgatcgcccagtcgatcattctgctcgttttggaactctccatgatgctcgcaacctccataatcaagccgttcatgagcaagggggctaatgtcgctgcaatcacgatgacggtaatgaattcgctcaatacgatattcatgcttgtttggacgaatatctttgaccaacctgagctcatgactggcatcctgggggtaatcttcttcatcctgaatgcgcttctcactctcttgctcctgatctaccttttggttggtatggtttacgccattttcttcaagaagcccgacaccaagtataaacctcttggcgatgaccgtgactctttccgctggtctcgcaccggaacgacgactgagttgtcgtccctcgagaagatcgcaagaggcgaggacgacacagaaggccaccctcatcccccgcccgtggtcactgctccgcccagcgacgaagatgtgtcaatggcagccaaaaggccatataatgatgttgtggacccttcgctgccgctcttcccagccagctatgaacgcacgcaacgatagtcgtgagcatttagagtcaatattttctctctttttctctctccttttctgtttttttttttttttttttttttgttttgaagcgagatttcttaattcctgcattcggtgcgtcggcgcttcgggtggctattgtacatattcaaaattttgacgttcaggaattgggctagataatatatgtttctagaaagctttttactgtgtttgctctacattgaatatgaacacctaattaaacctttcatttcggaataaagacgtcttaagaccgcgccaaatctgactcctttgccaaaggatttactctgctccaagtcttctaggaattgcaaggttattgccagaagagcatcagcgtcagggtctcgacagccgagaaataaatttcccgaaaaaaagaagcattagcttagtccattttattgtctttacaaggggagcgtgtgtcaagtgctagctggtcaaaggcatctggtctggctgtcatacaaaatgccctatgaggaaatgtcattccgatgttgatatctcttcgcacgttgtcttctagttcttttatcattatgatttgattacctatcatcaattgcttacatctgattaagttgctatatattgtctagctgagcattgtgagaattggttatcaccttggctttcttttcccagctcctaacatagacgtaaagaaacgaattgataccaacaccatttagttagttacagcttatctttcacataatcaatccaagggcactccaggaatgcggctgtgctaccatcccttgattcaggcgaccaacatgcgagtcttataaatatcaaatttgcatgcgtgttagtcaaggctgagcatattacgattctcgtttatagttgtacacactctgacagtgtcatcccaagacccagaatagactcgtcatctggaccaagacggacttagcgagtagccatccgattccgagtcaggccccttgtttgcagccaactcgaggagatatgactggggtgtgcgcagttcgatgaggtggcttaccggaaaaagctggataaaataagccggctgcataggccacgttcacacgcgtggaaaaatgcgacgtctccagtacggagtatctgtcagctgtttcagactcgacgctccacttcgctctcggtgcatatgtagctatggtcgaaacacatgttgcgatggtaacaagctgcagctactccgtgcactttcggcatctatgccggaacccactgtggattaagttgatccattaagttgcgtttcagactgaggcgtcctgggtgattggcaaggtgagtcaaatgagggagatgtgtggacgatcccttccccttctgtcaacatccttgccccttggatgatccgtttttggacaagtttggcttttttttctttatgataggtaaaatcccaaggagcgaagaagggtctcattattgagtttctgtaagcttcaggggctagatttcagtctaaaaaaagaatgagctcttgaccttaatttccccagggctgagaccgttgtgggattagagcacatcacaaactaaacgccattgcattccgtaccaccaggtcagctcacctgggacgaatgatcggcttaggtgttcgggcttagcgagccaagtgattgacgccgtaggtgtatgtagataaggttgctggaattccgccagacgtgccttgcatatcccaacaggagaccctgtcaaacatttcttaaaggaatgagcgaattcggacacgcgtgggaaaagcaaccttattattcctgaaacacaggtttccatatggcgagtgtggcttgggcttagccaagaattgaaaaatgaaacccaataatggggtatatctgcatagttagtgtacaacataacgccgtccgaaaagtctgtctgcggacatccgttatttccgaggatgcttccttaaaacatagagatcagcgccagcacacttggtaggtagcctttagctagacgccgtgctcgttgccctattttgtagatatgtaaacgcctttgatcagcggataggcctaggtcttagtggcactaaaaagcaaaatactattactgctgtttccttcctgggatgtcccaatctttggactcgtcataatcggctttaacaaggcaatccatgtgccccttttcttaggcaagctcagttcaagtttccgaaaataagtcactcgcatttcggagatcttcagttctctatgcagtatactagtatctagtcagttaagcattcctatatttgtaataatagcgatgcaaaataacctttagggctcaaggctggcaaggcatggctggtatggacctgctactatcaaagtatcctgcggcaatagtggcttgccttatcccgactcgtcgttgagggatctgcagggttgttctcaggaaagggaaatgaaggaagcatgcagcagacgcgcgtgggccggggaatgtagcatggtgagccttgttctattttatttatctttttgacctcttagagctgagtccctgggtcaagacatatgttcatgaccatgtgatcgaccacgttagtccccgacattgtttcaccctagagggagcgaggatacacggacattgcgaagcgcttgtaccgccaagggttccggatttgtttgtttcaacgggttctagacttgtcttgttcctgtttttttttttaaaaaaaggagatccttgtttgatagctctgtcgaatatccgtttgcagaaactcgagttgatgtttatttcaccccctcacttcattccacagcacatatgtagaaagtctggatattccgaaacctgaaacatgcggctggccatgtgccgaagaggaatgttggatttacgctcaggatgatcgtgaaagcgggtcttagtccacgcatccatatgcggctggtacctgcctctcctagccccggttacctgcatttcagccaatgacaacagacatatcgcttgttttgcgtagatgagccgacgggtatgtgcttttttgctatggaccctcggagtttcccgctaaacgaataccagaactggcatggttcatgcggactcagtcttggcgaacgttgagctcaagggtcgagatgccgtcacaggcccatggcaggcggaggttatgcactcggtgaagatcttttcctcgttttctccttcgtttaacttgtactgtccatgtgggctatgatgcgaagctcaaactcgcgtgtccggccgcaaaggcatgccgtcctcatgcatagcgtcagacctgcagtgtatatataagagcttccgctcagttgtatcctggtcatcatccactcagaaactcatcaattcattcgtctctacagttccttttcaaacataccgatcaaagccaagcacatacctcgctcttgagcaccacactaccccaaccctccttctttctactgggcctcttcccggtgacctgactctttgattcgcttgaaccgcttgcgaagacctcacgtttatcaccaacaaccaactacacatcatgtctatcccggtcccggaacccagaaccacatcgtgagtgtatctatatcaaagtgcatccttttaacaatgaactaaccggcttttcctagtgttgccaacggcaccagtaccaacgccttaagccaaggcaacgtcagccaagtgccggcaagcaaccgcagcagtgtggaacgattcgcacgagcaccagcctccgaaggcccttacttcgccaatgcgcggatgccagagagatcggcacacctcgcggcgctatcaagtcaactcaatgccatggaggagattatgaagactgggagttagaagatcaaagcaaatgaataaatgaataaataaattatccaacaccagcttctatgtatagtcggtctattaaatggaacgcaacgaaaaaccaatgaaggcggatatatcccgaaactccccctcaaagagtggatagattccgtaaacccttgttcatagtaaatcgaagatgtaagatgctacttcctcgtacttggtgctggggaactcatgtcccgcttcgtaaaacttgaagacaacattgccatccagggcagccgtggcatctggaacaagctcacttttgacaatgattgaatcactattaccacacagaatgtgcactttgttatccgccggccttttgtcttcattgcttgaggcgctattctgtgcagttaaatactcaccgagacgcgcccatgtgttccattggcgctctcgaaggattggaccataacgcatgctagacatgaacgcgtggacaaaccccttattattattcacctgccacgccacggtagacgggatgttgatgtggggatactctcgggacagaatttgagttgctgcggcgctctgggaaggcagttcttccgtgagtacatccgcggcactgggcttctcgttcttgggcctggacgaggccaaggggcctgccttcagccgacggctaaccaaggatgctaagatattctcaggcataagaccctttgagtaaaggagtcgactttggaaactgatatgcgaatcgcggagcaatcccgaaggggctaggagcaccaatgacgacagaagctgaggaaagtaggatgcaaaggcagccgcaatgccacctcccagagagtacccggtaaggcagaatttaccggactctgcacctgtccaagagataggcgatgatgtcagagcgaggaagatctgtgtcgagaagaggcggtcatcttgtggaagatcagcagggcagtcggagtatcctcttccgaacctatttttcaagggtcagcgataatacaaagtgttgaatgttgtgcaacacgtacaagtcaaatagcatcacacggcagccgcggtccaccaacgcatgggccaccccgccgagcgagatacacggtgtggtgataccgtgcacgaacaacaccttgggtccatcttctgggccccattcatacactcgcatagacccgtatgggctagcgacatcacgagcaccgggcagggcatcagccgggagaggcagtttacgattctccgactcgggtaagactgtcgaccgaggggatacgagaacagtcgggagcgattcgttttgagggaacaccgatcgagcgagtagaccaagtgtaaatgaagccccagtcactgctagcaaagggatctgagtctgatggtttgagaatgcaccagaaaggaaatccacagtttcgttgtacaggcccatggttgcaattgcgggaagtcacccctgaaacaaccgtagaagcaagttcgtcgaagattggaaaggtgttgtgatgtaatattgacgacctgaaccgacgagagtaatgaagggaggtaccactctgcaatgagggtaaacgaatgcaccgagttggaagacactagtgcttgagggctgcgaccgaggctcaccgcgctgccgtgttgacgccatgtgcctgcccaaatggtaagattagataagataagataaggataaacctcggcagttcggtcaactggtcagtcttggaagtatagagacccattcattcaacaccagttaaactacagaatataatcagcaggaccctcaaatgtttatttcaaaaaaataataacatcagatggtcctctccttcacagaatgtgtgacaggtccgccctcacacgctgcccgagccagccaatgacactaaggaatgttgttttcccacaatatctcacgtggtggctatctatagaccaagttattttcagtataagtagctaatcaatggtattctacgataattcagtgataattcagtgaagaggaatgtgcggtagtcgtgggtgtgaaattcagcagacgaggtcatccaacaacgtacgtgtgcgatggataaatggattgaacccatgactctcctatggtcaaccagttctgcaagaggatttgcagatcaaggtctagacatgaaggacaaagtgtactttgaccaagaaaatagcacagagagagaaaggaagtatagaaatacctaaaggcggccctaaggcaccaggcgcaggcctaagagaaaccatatagttactccgtacaagcgcaaagcttcatattatagatattgacttttgtattcaatcttcttcgggtgaacattagggctaaaataaattacaatttgggacctagtcaatccgacaaaggagggaaaggtcggatgaagctagaagcaaaagttagcaagggactcatttggaactggaataatagggacacatactgagcaggacactcatacccagcagggttattttgaagatagagctggtgatattcctccgcatcccaccactggcctgctggcaggatcttggtagaaagcggagttttataccactgcttgctgaccttgtctgtaatctcttgcgcgatcttctgctgctcttccccgtgcgtaaagatcgcactgcggtattgtgtgccgacatctggaccctgccggttttctgttgtggggtcgtgcatgcggtagaaaaattcaaggagctgacggtaggtcacaaccgagggatcaaagactatccggagggcctcggcatctgtggaaagaaaaaaaaagtaagtattcgaaggtgcgatcgcgataagaaattccgcgttatttctatcagatagcacggcacttacggccagttgaaccggagcagacagctcgataagtcggcgacggaactgggccaccgcagtagcccaccttggcgtcgagtaggcctttgccgttgccgaaattcttgcggtacaagtgctcaacgccccaaaagcagccagctgctacggtcgcggtctccgtgcctggcattttgcgggatttggtttctgatgtcaagggaaaagctgagctggtggagaaggaacgaaagaagcgtgagaaaagggtcgaggcaaccggagcgacgaaagtcattggaaattctggtgatggtggagacgtacttgataagtggggatgctcgcgggttcgaaagtgaaagggaccgtacaggatgctgtaagactaatgaaaggggagcaatttgaagggaataaatataaaaatcaaagtctcagaacaaagagtgagagggaggaaagggaagaaatagaagggagctcgagattagagcttcgcgatggcgtcatcccagaatttacaaagcagcgcggggaattcgacagggatggaaagattagggcttccagcagccctatccgagtattattgtgattgtacaagagctgccctccagctgaaaaccaacaatgcaagaacagagagataataacaggcgaaatccaataagaattctgtcgtacaaatgtacaaaaaagaaatgtggtatctgctacgccaacaaaacaccagttccaaacaagtcaaaacaaaatcaaagctagtcatgaataatttcaagtcattcaccagagcccactaccacgcttgcgagttgtggtcggcagcagggggtgctgccatcgcactgagacggatggcctctctgctggaaaggctgatatttcgaggtcggccgtctccacccaatgttgtgcggcggcccgtgttcttcataaccgggagagtgtgaggactcaagacccgaggcttgacatcgtgttctttctcgcttttgaccatgcgccgcgcttgtgatgcagtgaacatgtggttgtctgcgggcggagtcccataggtattagaagtcgggctgcgacggcggtgaactcgcagagtattggaggatgggttaaacagtccactaggaatccgtccattagacatacgtcgcatggctgaattgatcttaattgcatcttccttgtccgacttccagttgaccctgttttcagataccggactgctggagaagttgccgctgggactacgaactgcaatccgcgacggacgatccgtcgagggacggttcataaagctgcttccttcaatatcacggaggggagagctatctcttcttgaaagaggaaggctggatgacgggggtggtgccaatggtgagctgccatttctcttggccaagaatcctgccttaaagcgactgctgttcttttgaatgttcaaggtagacccagtggattcatcaggtgtgggtgaaatagaaccggccgggctgataaccctcggaatatttcgtggaatgggagatcccgatcgaggtggcaaccatgacttttcaaagctagtttcatcggcagagtcgaccttcttaggggtcttttggaactcggtcaaagtgccgtcttcctcatcgtccttccatcggacggatcgcttgggaattttcatctggactttctttggcgaaaaactgacactcttccggctggcagtgcctctacggcgacgtggagatcctttagttggtgaagcaggagcatcaggggtgagtgtgactggaggattggcgctcgatacttgtggcaagctcaccaagctgaagcgcttctttgtttttgtggggcttgcaggcctagcagagctgaggttcgggacagacggcatggtaccgtctggtttgacaaggttggttgctgcctctgaacaatcctctaacatctttgtaaggatagtccgcccctttttgagagcctcgttggcgtttagctgcatgatatcctcgatggagttcatcatctcaaactgtgcttgcaacagaagctgcacggcagcagcttctccagccttatcctgttctagcacagcggtcaatgcttcgcgctctgcattggaccgaagaagatctgcttctcggttcaaattggcatagtcgctgttatcggtaatgccaaactcttgaagctgctttgccgcgttctccaccgccgagttcaccgctcggtcccaagtgctttttgctaatttctggttgtaatgatgtctgctaccttccagttcaaggaggattccctgtgcagatttgcggacggcatataggttcgataagccctcctcagtttcatgcgcggcgcaaacattatcaaaggccgcaatccaggacgataaaatgccaattctgcggccgatttgccttagtttcagcatgttgttcgtcttctcttgtcgttcgggtaacgtatgttcgtaggcattgcgaatccgggaaacgccctcgcgcaaaacagcgtctttcttctcaccctgcttgcggaacttagtgaaggctgccttttcgtagtcttttgcctgtgctttgagctcattgatcaaattcatttgctcatcgatcttgaccaaaaagtccttcacatgtcggttaacgttgaacacatttcgtgtgactttagtctggatgttcttcgctcgattcgcatatcgaagtgtattttgggtctcgtcaaagtgctggcttgaggggctgacgcagacaatcatcactgtcttgcaattgccaccaagagcaaacttaagtaatcgagtgagctttgagttacgataggggatgtggttgcgctttcgcgggtcgcaaagtgcattgatgcaacttcccagggacaacagagacttgttgatattggcgccttcgaacaaacgttctcccctgttctgtgtcgcgctggcacgctcacttcccgctaaatcgatgatactgaaagtggccatagtgtgaggctcattgacgtcggcatttcggtctttttgggcgatgttgatttgaaggacggcatgcgatcttgatgaagtagcatttgctgccgtaggagacatggtgcgacgctcgttgccttgcatgatcatgtccattacctcccccacattgtgcgggtggtagcttgacagcccagcaactgagactgactggttggaatcctcccgcagcatcagtccaccctttccactgctaccacaaggaacaagcaagtcacgaatggtttcgttatagatttcgaggtaggaaagagaaatttcggtcgatttgtcgtctgctcgttcgtcaatccgctcaaaaagctcctgcatagtgagaaagatgataccgggctgttgggcagtcccggtgattgtatgggtctttccacatccagtagctccgtacgcaaatactgtcgcattgtatccatcgagcacgttgtcgagcaggctgcgtgttgtagattcgtatacctctccctgggaggcattttggtcgaagatgcgatcgaaggcgaatgtttggtccttgacacgcttaccatttggcaccacgctcctagagaacttttggacgggattgtcctctggggggtcaaacaccctagtccggttaggatgttggacccaaaacgttcaaaatacatggaatactcacaagcaacggtcgtcaatcactttaacgatggatcgtatacccttctggttaagcttcggcgtcggcgcacccgcgagggaaccatcacctaggaacagcggaccctcgtcacatcgtgtgatctgggctgcctctctgatagtaaatggacggactctgactgtaacgctgatcgaggaagcgccgtcggaggcagccatgttggaaggtcgggtcggatcaaccccaagtcgcgaggtgtcttgcggggccggtacgtcaggcggttgacgacaccctgcaatggcaaagccaagggggaaacttagctatttgtcaaaatcaaagaatgtagaaaagttgaagaatggatctaaaggtgtatggggtagggggtgcaggtattctccgagaggggctccttgaagcgatttcatttgttgatgcgtgtatatgttgtcatctagtggttgctccgagcaaccgtttcatagtggtatttggtcatttaggcgtggcaataccagtcattcaatacaaagagttcttagtcacatgatatgttgtgtgtttcaggttctgaacacgtcccgtccactttgttcacagccactatgttcaagttcgccggccaaattgcggttattaggcctttcatagtattaacctcaatatgctaagacaaaagctgtaaatagctaggaggagattatgatcgtattatgacattgactaacattgtaacgatttcagtgaataacaccaatctttaccataaagcgggtatatttgctctcgagatatggaaaatttatgaataaaaatcatcgctttcgtgttgctattgtcctagtaatatcatttttcgtctgcacaaacatcatatgatagtttgaccaccagagcctcctgaaacgccgaaggccatagagatgtatcctctgaccctagttcttcctcgcaaatcataatggccctatcattgttcctcgggctcatcttcataggtcggcatgatgacatcccagcctggatcttcaccatcaaggtccatatcaagaccgccattctgatcctcggtggatttgtggaaccggaaggcaattgaatatccgttctctagaccggcctccattacagttggtgagtcatttttgttcatatttcttttcggggcaccctcgttgtccattcctggtacatctgcctggaggcgtttccagcctttttcgaggtccgctcggtcgacaggctcaccgaactcaacatcggaggtggagtcaggaacaatgtcgccattaatgttggtaatatttcgcgatttcagagcatccagaagcctttttttgatgaagtagagtgactcgtggggttggagcatcagaaggatagtggttttatgcttcttgaagaggacggtcacagcgcgcgagtcggttttggattgcttgggaggctgcttgataattagccatcctgcattcgatgatatttacttgaagatatcaattctcataccatcttagaggctgcggggaaattaaagggtaggtcgcgtctgtaattgattatttgggagtgacggaaggtggagaatccggcgggactccgacttccgcgctccgaatctctgagctctgccagcatctcacattcaccacgctctctatagccagcccttgaaattggttgctagtatcctcattcttcctttacaagcttcaccatggacgccaatcaccccccatctaccgactcacagcataattccatcgtcctcaggatcgtccactgggacaagctgtttgaatccgacagtcctccacggttaggaattgagttcggcaagcggttaccgtatgctaccctatcggctttctcgactggtttggcattagggtactatcacggcagcaaaagggcagggctcgtgtttcgggctgagaatgcgcatcgtttccccacgacatcaacaggttggttccagtaccataaaacgaaaaactatattggcgtggttggaggggtcaaggatggtatgaagatgggattcaagctaggtgctggcgcacttgcattctgtctgtttgaggaaacagtggactatgctcggcatgacgagagagactttttatcgacggtcactgctgggctatcattctccggaatctacagcttgcttggtaaggaaactattccacttggacatcaatactaggggaaccgaagctgacctagcttgcatacagctcgtcacgatgtgtacactgccgcccgcacagcgaagcttgggttgaaattgagcttgacctatggtcttctgcaagatgcccttgggactttgaaaggaaaccgtcctgcctatgttgctttcctcctcggcaaccggcggtccaaagtcgataaagaagcatcaatctgatcataggcggacccatatcagaatggtcccttagatccttctttgtgcgcatgccccagtctcgcggcaggcttgagagacccccaatgccgataaacaatattaggctctcccacttcactccctaggacactcttcggcctacgcatgctactgcaggtggtatgcattcgacgccggcgagatgagccacatatccgagtcaatgccgccccaattactatgtctaggcctcgagccactctgaggtttttagtcggtgagcacggcctctctccgtctgatcgtgtgtttttcagaagcaacacccacactgtactcttggttacttgtattatttacattttttgataccccctcgtccaattagcatcgaaccaatgaacattatttttccttggggtgctatgtacatagtgacacgtgacccgccggattctgtgttggggttatgatcatgcaccaagtcgattagcaacgccattgtggcgtgactagatcgcattcggactaaaatattaaggcattctataaacatccaacgattggcgtaggattactacgtggctacatggccctgaaataatataattataaaaaaagtctgacggttaccccgacacaacgatgtagagaaacaaagtaaactagctgattccgggccctgacagcgaaatctacgtacttcgtatatcttcccaattggcgtccacggatctttctttgtctccggggataagcaaatagagaagatcggcccgaatgctgcaggttcaaaggatggtgattgaccgctcagtgctgtcccccactttttttcaaaaggaaagaaagaaacgtcttcaagaccaatatgtatctatattgatctatagtgatctatattggcttacaagactagaatacgtcaaatcccaaagtggaggttcccatagagtttccgaaggcacccaggtgatcggtggagaaaccgcatttgacgtcgctgattcggaaaaccccccacctcaacaccttagctcgaacttgtcgtgtccgacctttttttccccaatcttcgcttctcctctataccttacgtccatgtctgtccgttaaactccgcgatagcaattgggcgaagatgccgatgcgaggttcgacgctgctttcgtcgacgtcatcgatttattgacctctttaatgcctgggagaaataattgaatcatccatcccacatcttcattcagactcgtgaactgcatcacaatgcgtcgccatggcaggtccagtggcggtccaaccaaggccgtctcgcccttgtccgacactgtatccctcatacgttcattcgattcggtcatgaacccaaaccgacccgcgcgcccctcgcccttggcttcctctcacatccaagctttgcccttggaactagtagatcggttgcggtctttcccgctgtttcaagctaccccggaatccttcctgatcgaggttggacagcacctgcgtccacagctccacgcacccaacgattatatcttgacggaaggcgatgagtcaaaggcaatatactggctggtgcggggtgccgtctcggtcacatctcgcgatggcgagagcatatacgccgagctcaaacccggtgcgttcttcggggagattggattgctcatggaccgtcctcgtactgcgaccattatcgcccggactcgatgcatgctggtcgtgctgacaaaagacgactttcggaatatattgcctcggtatccggaggtagaacaggcgatccgggaggaggcggaggaacgattgatgattttagaaaagaaaaaaaaggaaacgtcagcgcctgcactggatatgccgagcccggcacgaagaggctcaaaaagactgcgtgaaagcatttcgaagggtctagctgttgcagaggatgatggggacgtgagtgccaagtctgtgtacaagaagaggaagtcaccgagtcccggtcggcgggatggctccagtgcattagcaaatggattggtcaacgtacgtctcttactgaaagagctgccgcttttttctggcttgcctgccgatatcctccactaccttggtctcaatgcccaaccgcgatctttccctccatttaccgacatcatacaacaaaattcccagggccgtgagctctacttcattgttcgcggcgaggtagaggttcttacggaaaaggcggagatggaccactcgtcggcaaacaaaaacagcccaaatgggcacattgaacagccgggaattgaggtcaaagctagactgaagcaagggcagtactttggcgaggtggtcagcctagatttggcacctcggcgaaccgccaccgttcgatctgtgacttcagttgagtgtttgatgctcggcggtgacgtcctggctaaattttgggagaaatgccctagtgacgtgcgggaacaagtccaacgcactgcccaggcaaggctccaggcggcagccgacggcgatgttattatgtctgacgaggcggactcacagccgtctcttggtgatctcgccctcgacgacagggtaaagatcacatcatcgcggcggcggtcaatgccactgcttaccctcactgaaaccgagctggatggaccacatcaatcctcaaatgctgaagaccaagaccaggacgtgctgcggccctcagatcccgatccatacttcagcatgggtctagataaagtccggatgcgaagtcgacgtggctcgctggcacctctagcccccgaggaggtatcaagggagcagcagcgctcatctcctacagagccgtgctctgccagttcttcaaccctcgcccttcctgaaactgctagcctttccaagtcatatcataccgaacggccccgggtcgatggtaccaatggattactcccagacagtgtattgctgaacattttccaattccttgagcttcaccagcttcttcggattagggcggtgtcgtcccattggtcagagctcttgaccagatctgcggacgtgattcatgatctggatttgagcgtctacaaccgtaggattacagatgacgttcttgttaaaatcatctgtccgtttgttggcaatcgagcccgatcggtcaatatcaacaactgctttcatattaccgacgaaggcttcacggtgttggccgcgacttgtgccccaaatatcaccgcgtggaagatgaagagtgtgtgggatgtaacggcctctgccattcttgacatgtccagcaaagctacaaatatacaggagatagatttgagcaattgccgcaaggtcggcgatacacttctcgcccggatcattggatgggtagtgcccgccgaccagacgatgggcgagaagcagtcatcgatcaaacctacaatacagacagcagaatttacagtgtacggctgtccaaagttaaagaaacttactctttcttactgcaaacatgtcaccgatcgatctatgcatcacattgcgtctcacgccgctggtcggattgaggaaatggatttgactcgctgcaccacaatcacagatcaagggttcaaatactgggggaatgctcagttcactaacctgcggaagctttgcttagcagattgcacgtatttgacggacaacgccatcgtgcatctaactaatgcggccaaaaacttggaggaattagatctggtaagctattctttgtcgggctctgtcgaactagaaataccatggtttactaatcgccaccagactttttgctgcgcattgtcagatacggcaactgaggtccttgccttgcagtgctcacatttgaagtatctcaacatggcgttctgcggctctgcaatttccgatccctccttaaggagcattggtctccacctactttctcttcaacatttatcggtccgtggctgtgttcgagtcactggagtgggtgtggaggctgttgcggagggctgccaccaactccgggttttcgatgtcagtcaatgcaagaatcttgcaccgtggcttgaggacggtggtgctgttcactatcaaccgagagtcgaattcaaaaccgtcgccccgaacaagaagcttcctcgattaggaagcaacacatacaaagcttaacctcttcattgcacactcttacgctggtttctctaccgttaccttttccccctctacaacgacgcctggcgcgacgcccgtccatcctccatcctccaagttgcatgatacatttattgatagatgatgtacgcctctctaatcttcttctcattaatttctaggcttaccattctctagtttccgctttgccatccctaactgatcgatctcggcgtttgaatttaccaggacaatcttttcacattcggattcattcttctcgcgtcgggctgcaggttcttgtttttacattttggtgggggtttcggtctagcctgtgggcaggtcaagcatggccggagttcagagattgaaagcatctacgagttacatggtgtttgtctgttttccttaatattcagtgttttggggctatcttgtatcctttcttacgatgtaacgatgcacatctatttgattttatcgacatttctttctgtattttaaggtccttgatgctatctatttctggtttgtagaaattcatttgactataaagccgaaggtcttgtagcgcatgctatagtgccaagcccaaatcatatacaacattgaacgcttttccaaggttttacattacacctacacaatccatatgtctctacccttggaagttgtaaacataaaacttcaacttatagcctaaaaatgtcctttgtgaagtcttttctgccccctttgtcacctcttcgctttcttggaatctttatcgggccttgtctcaacctatttaagatcgtgtatgaacattcattgagacgaagacaaagagcccaatgagcattgtagtatgttctgttataccttttcatcagtccccatgctcttcctatctactctatctcagattgacttttcgaaatctgaactcgctgaccgaaaattatgtgctgtgttataaatagaggataatatatcgccatcaatccccacgctggcttgaaaaacgaaaaattgcagacatcagccagttctgcttacttacaatggtggctgctttgatatatagtacactcagcatactgtctatactctgtcttcggcttctatgtatttcacaaggtctagatttcttttcactgtgtccgtgttatgctgtttcgggtggccgtatcacgatcttttcgctggtcgttcatatcatttccatggtatttacttcgtgatcttatatataaagtgcctctctttatggtccatcagtcggctgatcaagatgcgatgccattcgtgcctaaacagagcatgtctccccaaaaccccagcttgctgtcttttcccacatttagccgaatcgtcaatttgaatcatccttcccctggtctctttaggggcccaataatactgcctgaataacgtatggactacgaaatgtaagctacagataggactagccgaaagaatacgaaaggcagagatttgaaaaggatatgaggtgacccaccctcgagggagccggacatgggcgagcctggcaattgtggatgtgatggggctaggataataccttcttcaaccgctgagggagaagagtagctactgacggggttgtccaaacccgctgaagcggcatgtgccacactagcaatggtctggtggagagatctatcatcacaatccacccggaccgagaccccggcagccggctcatcgcggcctacagcagtggggcactctggtaagcggtcctttccctttgattctagatcggctttctgtgctgttttcatgtaggccatcatattcagtggcaattagacgaattccatttgacatatagtactttgtactcacaaggcggggaagatcctcctcttgaagtccagggcaaggggaattggtgaaacatctgttctcaaagagaagcgcaagactgccttctatttagcataactcaactgccagcaggatctcgttgttttgcacaagcttttagttgagaaatttagcataagatgtgaagtgagtttggtaatagcaattacagccgccagccagccgagcacggtacaggcatataaatggcaccggctcgatctacctctagtctgacttttgaggatttatatatgcaagttggtctcaacgaaccaagggtcagctgaaagtgtgtcgatctgacggcgatcaacagatctagggtttctcacagcagtggaaaacttgttttcctttttttcttgacctagcatatgtaaacattctaatagacaggtctatttatgtgtttatgtctcaaaacaatagaactataccagaatcttaaaactatatgacaagtattgtggagtaggtatagcactaagctagaaggggcaaacgaacacacagcgcagatgttgaacattggagaaaacgtgccatgtgtattttgaatccgacctggtctgctctttaacaatgccgtcatacaatgctatcatataatacagtctgataaaaaccagttaaactacagcaaaagcaaccaataatcaaacccccttacattccacaccccttggtttattgtagtagatctaatgacgcatgtgtagttactcatgtatgtagatcagagattgccaaaacttatgtatgtagatcgaaacattccttctagaaggatacctgaaaacaatcggttgctggccagcggtgaggtacccggatgagggttatgcttatcttgaccgttatcggtctccccctattattatcgccgcacccagccgagaacgagaacgatctctcataatgcatgcccgtgccagacactagtgatccgcgtccctgcccagtgcttggtgtatccgccggtgcctagcgactgactgacaactgagacagataaggttagatcatattggatcacggtcctaataggcaggagtcgctagtcaagtcttgggggcaaaagtgagcttcctagtgcggaatacaggtgcttggtgccgagtccgccgagagagaataatgagtgtagcgagctcttggtagcttgtggcagcctaatgcgagggtcacgcatggagtacggaggaaattatcgaattttaaggtctgatttctcttctttgtcctaatggctacatttaccttcggctggcctcattggttcaagtcaagacgccccgagaacggacatcggatgtccgacccaaggggtatcaaagtatatatcgtacagtatacgtacacagcaagaaaatgtactccgcactccgcatggtacatcatattcagaataacattgtcgatacacggggtatggagtatgttgtacgaagtatatatggagtcgacattgtctgaactggtttatctgcggagaaaggaaaagggaaagtggaaaagtaccaatgctcgcactagtactgtatctagtgtactccgtacagcaatttccgacgacaaacacctggggtgtctcacttctcaacggtcacgcattggctgctggccatcattggtcagataagaataatttggctcaaagctaagattggctaatttggtcaaattagcgtatcttttttcctttgtcataccatgatcacctgcgcaggatcagctgttcatcacgaacttaaaataccagaatactatacaataccatgcaataccacgcacagacggaaccccttgaacctctccacaaaaaaaagggaaaaaataaagaataaaaaatagacgagcaaataccagccaatcagaatcagtccaggcttagataattgaccctttgacttcgacccgtggaccctaccttccaaggtcgacggcgtccatcctgattgggttagcgcctgtcaattcatgttttcatgttttcagtccacggaggggagggataactaccatgcatggtattaataactatcgcctcccctccgttttcattctctttcgatcagacaacattgaactgctttcgttctaaataatcatcgcctttgcagtggatataatcttcacttgctgcctctcatttatatcaacatctaacttatactatcgccccctttttttgtttccccacattttccctcgtttcctgtggcttggattcaaatcattcgatattctgtcatttccactgtacataccaacagtacatatataatggttcgcttcgtgacacctttggtcctggcctcgctgtcagtgaccgccttcgccgcgcaatcctgcagctccagcagccagtgcgacgagaaatacccctgctgctcccgtgagtgatactccctctagatcgcaattgatagctaacaagtcattcaaatctagaatatggtgagtgcggtactggtgcctactgcctgggcggctgcgaccctctcgcatcgttctctctcgattcatgcgctcctatgcccgtctgcgaggataagacttacaactgggacaacctcaacaattccgtcacccaggacaagtacctcggtaacgccagcactgccgactggacctacagcggaaaggtgaaaaccgaggatggcaatctgatcatgaccatgcctgccaacagtgtcggtactctcttcgccaacaaccactacatctggtacggcaaggtttccggaaagattaagagctcccgcggcaagggtgtcgtgactgcttttattcttctgtccgatgtcaaggacgaaatcgactacgagtgggtcggtgctgatttgaccgccgtgcagaccaactactactggcagggtgttctggactgtaagtcaaaagcaacaaggaatatctgatcccaataataaatactgacttgatgaaccaggggagaacgccggcaacatcagcgtggatggcgaggacaccttcaatgactggcacacttacgagatcgattggacccctgagaaggtcgactgggtcgtcgacggctccgtgcgccgcactttgaacaaggccgacacctacaacgagacctccaagcagtacgagttcccccagacaccctctcgccttcaaatgtctctctggcccgccggccaggccagcaacgcccagggcaccattaactgggccggcggtgatatcgactggaacagcgaggacatccagaccgtcggctacgactatgccatggtcggcgaggtcagcgttcagtgctacgatgctccttccgacgtcaccaagaccggcgacaacgcctatatctacaccaaatcttctgctatggagagcgatgtctccatcaccgacaactccaccgtccttgcctcgctgggcgccaccggtctcgacatggatcttggtgctgacaaatcttctgcatcctcctctgcgtccaatagcatccccaccagcaacggtggctccggtggcatgaccagcaacatcaccagctctggtgaatctaactccagctccagctctggtacttccaccacggatagctcggggacttccacttcgggtttcacccagggaaccgctacccaagacagcggtgcagccagccaaaatgagcgtgtcctccgtggctcgctcttcggcgtcctggtggctcttgttgtccttgtgacaatttaaattttttgctggtttgatctatatatcagcgttttgtccttattattttctttcttgccatgcttattgcacagcattgggtacattttttgttgactactgtgcaactttgcttcgtgtctatctctgaccgaccttgaacaaacacttaatgaatacctttgttccttgtatattttttttccttctcttttttttatcctccttcttgtcccttcattaggttgtgatgttcaacggttgactgcatacgtgtctgcattttccctccattttattgtttaacatacacctccctggcgttcttggccgattcatgctctgtcggtttatttttgattgatgtaccactattctggtaatgacttgtgattccctgcacatgactggaaaatacccacaagctccctgtgatctttgttcatatttaatctctatagcttcctctttctgcgttaatttttatttgccgctttttgaccactgataaaactgagcccttattgtgtaaccaataagcttgtctggaactaactaggcagtctgccgggaagtgaccaatgagacatttcttcaatatttgagcatgcaaaatagatatgaatatagaatgataacaaacagcgttgaaaggagcatataaacatagaaaagaatgcgtgaaccacaaaatgactatttccaagaagtcatacccagctttacgccgatttctcaaccttgatctttacttcctccaccttcaattcctccttgagaggctttcttgcccacacgcgattcctgaaatatatcagcatgagtaaatccagcgatccgatccgaaagcaaacttacgcaggttcataagcgtgaatacgcgggttgttcaactccttgcgcactttaaccagaaacacctgcacctcctcctttgaccacggctccggctctccaaagtgagtgagaagccacatcgcccagccttctagagcggcgttccaatggctatgctggaggtgtccggcctccttcagtatattatccctggcccaacatcctagaggaatcttgtacttttcctcatgcacgtccacgaacccggcttcctcgattgcgctacgcattgtttcgtgggttctgagtgaccgtcccgctcgttcggagcatccgataaaaatgtcgccccaaccatatagctggtgttctttcgtcaaggtgccgtcatcgctgtagactcgcacgtccaattcaatttgttcgatccaaccaccaggctctagggcactagtgagagatgaaagaaattagggcgccatgtctcggaaagtcgattagtagggaattggaactcactcgtaggcctgtttgtatagcttttgccatccatcgggagggaaggcgccatacatgaggcgcatgtggataaagtcaaacggctctctccatgtccactcgcgaagcacatcatccacctcgaagatgcagttcgggggcatccataacacaggtgggggaaagagatccacgccgcggacggtagctagttagtttcagtcaggggtagttcggtcagaaatagaaggagtagaatcaagaaattcaatacctaacggatagcgatcggcaacatcactaaggacttgttagagattctctttctctcaagaagggctacccgttgacatacattgcccaactcccttggccagttccgatgtccaagatattctatactccgtagttagcagggcgtttaagcgagggtctccgtataaattcaccttaggcgaagcgccgataggggaacggaaaagaggatttggctgatcgtgatctagcacgagaaacatcaggtggctgaatttgttagtatcacatctctgaaaggtatggggacgggatgtggtttacccaatctcaaatgcctcaaattgctgctcgtcggaaggaccccttgatattgttactttatgtagaacaagatcgctgcatcgtaactaaccagtagtcatcttctttgatggcttggtatctgcataccgggttagtcttacaaagcatcttagactggaagtatactgaccttcggccgttctccagccgtccccttgcaatcgcggacgctatggaggtggtatccctacatactggggtaagaactcgacttatatatatgatttgcagtgacactcacgactgaaggtcatgctgatccacgtcatagccagtggccatagagtagaaatcggggtcctaggtgagaggtgagaatgactatatcggattatgagattaccactcaccaccgcgatttggtccattttcttacccattctctcgacacttttccaaatactgtggaagataaaaggaggaaaacgagggtggagtgtaaaagtgtcagcacgggaacaaactcccggggaatccacaaccgttaagctagcagggtgtgagccgaagccacagccctagagtatgaccgagttgggtctaggttgaggactcgcataaaaaaagtacgaggggaacggcaggatgctgttgatccatgtcagctggtccgtgtgggacctcataaagcggcaccccgggagccatgttcacttctgagtatgttgtacaggcagaacaacaagccctaaaccaacatcctcccacttggtattccacaaaacaaggctcatgagccaaattcaagctcattccataataggtggcctcaaagcttgcatctaccttatcacaaatcaggtaagatacgagcatacccctcttgggagcaacctcaagtagagatcttcgaaggataacccatgcaataagagaaattcaatggtcccttgagccgttttatgttgatagatgatatttcagtatataaatcaagtattgcctcggcatgagacgtgactacaagatatagcaatgtgagcgaaacagatagctagtatgtaggtatgcctttcatgtagcttcatataactcttgggatattcacggataggaacatttaagtctatcacagcttttaatactctttgtctatgtttggccctagcctccttgtcccattatctcaccatactggtttctttcttgacatctgcgtataagctgtatgctccaaagcagttgatatttccctcactaaatacctttacctcctacctcagactatactccagggctttcatcatgatttacgtaaataaaatgatatttgttcttgtgtggatggagcaaacagagtagcaacaaacaaggcttattcttcagctcacttttccttcattgtcactgtagtatatgacctggcttcattcactgtgctctatcaaaaacaggcttgctttaccattgcgcaaagcccatttcttcgtatactggactcccaacttcctagcatcgcactcaaccacaggttctctatatgataacaaaagtcatactagccagtctcatactacgcgacacgtcccagacttcccactacaatcaatcaatcgccctcacatagtgaggatacaaccagtaagcgcaaatagacattctacctcgaacagcactgacacgtaataaagctctctcaaagcagacgaacgtagagtctgtagcctcgcgtggcatccacacgagatacttcaaaatgtgtctattcgtggagacccactacttcagttgcaagcatacgtgcttcgagctctacctcttttgccgcgaggtcctccatcaactgaaccgcatcaacgacccgcaacagctcagagactacgatctgccatttgacccagattgccctacctgccagccatatacaatcaccatgagaccaatcacctccagtctggatgtgaattatcagagtgtgattttggaaagtaatattgtgcaccggagaatggatttggtggcgagctgtcctggttgtcatacacaagcattgtgattccaatttatactttagccagaatatgggttcatgccgatagaaagtattgtggtgatgaagggatgtgcctattgaagataatttactgggcatctagaagccagaagagaagataacacccaaaataccaagcttatttctcgtaagactaatgttcgctgtacacgcgtgttcaagtaaatgcgagagctaaattgcatatatgtatatataatgatgatgatgatgaaaccccgaagtattgacagtgctgcccagtacagaaaattcacagaataggtaaatgccgagtggtgacaatcgtttagtggacagcaccacatccacaatcatcggcagatcgcttcctgaagtctccatggtaagtgtctagtccctcggcatggaaattcaagcccaggcgatcgcccatccagtcacttccagacttagtatcctgtagcaacttcgtgacgttgtcgacattgagatcaagataatcagcaaggaagtctcccacatcggtgttctcgttgttgccaaccaatggccaagcatccttggtagacgaagcgtagatgttgacgtcaacagctataacgaaattagcatactatcatagatcactgcttgagactatcttaccagaatgtccatgagtagtccagccaacctgagcgcgacggctgatcatgtccgcaaatacgtatgccgtagtgacttcggggtccgggtggagcaaggtattcacttcatcgtttgaagcatcatcgatgccaagcccatccttgagagtttgccggatccaagactgtttactcaaatcctcggcgtcctttcctggcccagaaagatattccttcagttgagcggcaaggtattcgccggagtggtttgccttttccaggacattcggaagccacaaatactccgggtagctcttgtgcagctgtcgtgccgcggcaagaccaccagtctcgtggtcggaggtgctcacaatcacaccaggagtagagtcattctctaggaactcgagcgcggcagcaaatgccttgtcgtatgccagtacctcgtgaacctgggcggcaggatcattgccatggccggcgtggtcgatgcgagagccctcgatcatgataaagaacccttgctcgctgtcctcggtggccttgctcaaggccttcaaggcagtgcgagtcatctcctccaaagagggatagatatcattctgagtgcgtcgatcaatctcatacgggatatccccgctagcgaagagacctagcagcggtaaactgacattatcgccgcccttgaggctatcgaagccagcacgatcatcgatatagccaaatccattctgagaagcaaccttgaccaaatcatgatcatccgaacggcagctgccagcctgtgagttgggcaagaaatggcaccgcccaccgccaagcagaagatctaccacccgaccgagagggtgttcaccaacttcttgggcggcgatcagatcttcgtagttccgtaaattggcatgtgcggcgaagcatgctggggtcgcatccgtcaggcgagtggtcacaaccagacctgtcttatagcccgccaatgcagcggcctccagcacagtcccacaaggcgagtggtcgggaagcaccgagatagcagaattgtagctcttgcgaccgcatgaaaaagccgtcgctccagctgcagagtctgtcaccaagctagagcttgagcgtgttcgcgaagtcccaacgtagtgtttatccaagaccagaatgtcatcgaatggcagatcgtgcgtgtattgccggaagcttcgagtcagcgagagactagtaggtcccatgccatcagacaccatgaagatcatgttccgcttgcctgtcggcttgcctccagggccccaggtcgtgtttgacgcaagatggttgtgaggctcggctgacttgtgtgggtagatcgcggccagcacaatgaccaaaattgttgcaacaagggcccaggaaaatactccaatttcccgccaggaaggccaggctcgtcgtttgtcttgatgagtcgttcgctcgccggtcagaagagcgtagtcctcctcgtcatttcgaatcgatgagccatcggaggacaggcggggaggtaagagagactcttcccgcgccatagctgggatagagacagaattagagaagagtgaaaacagatgtgcgaggttgagagatttgattacggccttccaaggttgtgtcaagtggaccctgaaccccaggggcggaggtgaggagataaggctaagataacaaccctagaggtcgcgtgacatgtaactgtgtatggatgcaacgtactccgtataagaactacacctagcctttcgtaaaaccaagaatgaacggagaaaaattcttacattttgaaacaggctagttcatatacttgaacaatatttataatacatgtcattctcaagacaacctataacccctatactatagaggtctggccttccacccaataggaatcatggcagcagcaatctcagttacaccgcgctccgtcgcaagcagattgaactgtgcagccgcattccgggtatcgagaacatccacccgaatgcccagcgagttgatgtgacgtttagtttcgggcgagagtgggaacatggagccaccaagaccaaggatgagcatatctgtagtaaaatattagaaaattggagagtaatttggcagtcaagctcaggtatgtctcatccatggacgaaacgacatatctgagggaaacaaaaagcaagaagaaccaacataccaggctttggccagacaagactcaacaaaccccagaccgactcatcaagctcaaactgccctttggcgttgagcatagcatccttagcggcactgtcgctctcagcgccctggacagccttccacggtcgccacgcaaatgcctcaccgccaaccagcaacagcccatcgccgttggttagcttgacgccattgttaagatggaacccagaatcgaggcatgcatcaatagccgtcgttggcgcagggatgttgcccagcacgtttaacgcatcgaagttggtctgagtgtcttctttggactccgggccgcggtcgcgactgacgggtttgtgcgcgtgtgagcgaggaatcatgcgcgttggttggatgggtgaactatagttccgacgtcctgagggcaacccagtgttggaatttgagacgagacatggtgctgcggtcgctgatgggatctggcagaatcgagtcaagttcgaagtgcggcggctattggctagagaggtgcgtaagacgcgtaggagttgtggtgatggtgaaagcattgatgcgatatgtgggatagagcggctgtcgggttggttctgtatgatatagcttggtgatgtaactagtggctcggttggtgtcacgtgaagtaaaccttggaagctttctgtcggggtcttggctgagaaagctagcggccccggcctacatattgacacgcactaatgcgcctctacataagtttaatcatatcacgcactcatattgcaaggatgtagaaagaaaaacggttgggaattctatacaaaccgaaagtggctctgtgtggagtgagcatggactccatgatctcaacttgaagccctagtctatcagatagaaatgatgcacacaagcaactagttatgatccacgttaataattgaattcttcttatattaatattgagcctagcgattcatctattttgactttgcaggagtcccaaccccgaccctctgcgtctggattcatatggaacaaggacaagaggagagacgacaacatcgtacgcgtcgtaaacccaaaacgccaacagaaaaaaacagataacgagggggaaacgatacctggaagaacgaacgaactgaaaaacgacaaataatggaagaagagaaaagcagattatgtgtcacccctcgagatgagacatcaaacttgatgtcatgctgcctccgattgctactgcctctgaatacttttcttgtaaggatatgaagaaaaaaaagtatgcatatgtgaaaaacaagagccattcactgaccctattttagcggttcgggccttgctgattttgttgtttcagcgaccgaacaactttgcggtcttcatccgactgactagagctgctatcatcgcttgtggttgcagtgcggattcgctcggctagaacctgagcttctgccatagccttttgggcgcgaatctgtttacgccacatgctagcatagcgacccttcatagccaaaagctcttcatgggtgccgctttcagccacttgaccttctgacaagaccaagatacggtctgcggtagtgatggtgctgagacgatgagcgatcaccagcatggtgcgaccccgcgagagagtagcgagtgccctctgaatatgctcctcggtatctgtgtctagagctgcggttgcctcatctaaaagaatgatgcgcgggttcttgatgatggtgcgagcgatagccacacgttgcttctcgccaccgctaagccgtaggccacgctctccgaccttcgtgttatacccgtctgggaaagcaagaatcttgtcgtgaatactggcagcgcggcaagcctcgaaaacatcttcatcggtggcgtcctggttggcgtacttcaagttgtacatcaaagtctcgttgaaaagtacagtatcttgaggcaccacaccaatgttctggcgtagtgaatcgattgtgacatcctgtacatcatgtccgtcgatacagatacgtccattatcggagttgtagaatctgaacaagaggcggaagacggtggacttacctccgccagactcaccaaccaaggcggtggtagttcccggctggcagtggaaggtaaggccattcaacgcgggcttacgcgcatcgtaagcgaactcaacattctcgaatttgatgtcaccattgcatacggccaatggggtggcacttgggctatcgaccacagttggctgctcacggaacaattctagcagtcgttcggcattgatcaatgcagattgaatagaccgatagaatgtgccaaagaaattgagcgggccctggagttggaccatataggccagtagagacacgaacttgccgacagggcgctgaccactagcaacctggtatgcacaaatgaagcacattatcaacaagcccatcataaacacggtgttttgacaggtgttcagtagtgttagagagaatagcacgtggtattcggccttctggaagtcacgcacagcaccccggtaccggttgaattcgtactgttcggcattgaagtatttcactgtctcatacgagaccatggaatcgttcctagaagaagcataagttagtaccacatttgtctcgaatctataacaaaagcctccttccaacttacttgacagcatcttcttgtcgcgaggcattaaccatctgtcttctgatctctgctctccactgggccatgcgaatagtgacatagagatagccaaaagtagaaattccgacagctagggcatagtagacatcgaatgcgaccatgaagtacacaatcgcaatgacaaggtcgacaagcattggcacaacctgaaaggtgacctgctcaaggaaagtattgatcgaactgcccttactcagagcggacaggacttctccggtcttttttccgagatggaagtctaagctgagactatggacgtgttcgaatgcagcggtggagagctccatgtaagaatactggctcacgggaatccagaggctagagcgcagagagctgagtaggccctggccgccctgcaaccaccggtacaacacatacaggcaaatttgaagccatggcacatggaagtccccaccctcaccctcgctcttagtaagagaacctgtaatgagtccgatttggtagggtaccaggacgttaacgactctctggcatatgaggagtccaaaacagaaggtgacaattagttgcagacggcgagatttggacggccacaggtatgggaaaaatagcgagtacccgctcaggtactcccaccagctagtggaagggacagtcgtcggacgcacccatggatcggtaggtttggaattttcggggcgaggagctccgttcgtcgagccatatgaatgaccattggcagttccgtttccatgtccgttcccattgccattttctgcaccaccggaatccaaaagtcccgtggcttccgtgactccattcgctccctggcttgccttcccgtggctcttcatgctgaacgattgacaggcgtagagaagaaccagtgcaaacaagataaggatgcgtacactgttcgatcccacttcgagggactcccataatgtaatgcttctgcggatccgaccaccttctgggtctccgacaattggctcgtggtgaaccgaggtgtagattgagagggaggtgctaacaataaccaattcgatcgggatggcgacagaccaacagacaaactgggcgatcgtaggcgagggggatgtgtctagcattgccatgagcagcactgcgtagacgaagaacgagccgacgacgtaaatctgtaataagtgtcaacggctgtcgagcagcaccaaaccatctgaatagaacgtaccacgaagggctgtcctcgccaccagttctccgacctggccgtcatcacatgtacgatatagatagttgcatccgcaaggaaggtcaaaagaatggccgcggagagcaagttgaaaactcgtttgacgttccgcgagaactcctgggatttgtaggcaggcacacttcgagttcgctgagggagtggtcgccctcccgggccaaagtattgagactcatgcttgctagctttcttcgcagcgatggtagtactagccacgaaggccacgacaaagaggataagaaggaaaattgggtaagaggtgcgcaagtattccagcagctcaagggctgcatgaggatccattgcccactaaatatcccggaaatgagtgttttaaacaaagtccatgacagactcctccctcgaaagaaaggtaagaaagggagattgccgggttcggatcggaaaggactggacgacgggtatggcgagagatcgacgcgaggaatgatggcggagaaacaacctcagcaggtttccacgtggaaagtttaggaaaaagaaacaagttgaattatgaagattccacagaagcaaacgtaagaaaagaaaggaaaaagatatacgaatgcttattcttcttttctcactaaatttcttattaaatttattttttttcctacttggcttttgcctccaggatttatttttacctagaaggaagggattggatgctttttaagccaacaagagcagtgctataactagaacaggaagaggcaaatatatggaaatattctccgtaaggcatgtatatatagacatgggtagaatggctgaatgacggtgtggattggatatgtatgtaggttgctgcagctaaaaaaataaaaatggggtcacgctgcaacttgccgttctctttaatatctatatcttctttctctgggttgtcctttagggttctgtctgtctctggtaatattggaaaatgtcctggtatgaattaaacaatctacagcccttcctgcccaatggttggtgttgaaattgtctcaaagtgaaaacagggggggtagagaaggatcgtcgatcgatcgagaacaatccgcgcagatgcccatgtgatgacttcactaagctgccaaggaacataaagcaacccgaatgtattattttgcctctcttggtgtcttttagtcacgtcgggtggccaaggggcgcagttcaatggccacggatcgtagtacccactgatttggtactcgtatatgatgtacgtaactagtttgtgaatatgtcatccctgaagatctatgaatagttatatatttccgatgtatgtgtctcgtgttccacttcctaactggttgaggcaaaacagaatgcttcccaggtcttatatacaactatatactatacagtattataggtcttttaatcttttaatctatagacatgttcccttgaagaaaataaattgtaagttcacattcgaatctgatccctctcatgtgttgtcttctagaccgcccttaacatatgttcaggcccgatggctttcaataggtaaggcttgaaaaatataatatacattgtgagaaaagtcacgtagtacaactaactgatgccctagcttcatgtgtaatgttataactatcgtccggtatgttgttaatggatagcagtaaggcatagatcggtgcctcagggatctctccctcaccgcttgcatttcgatgatcttcaactctccgcatctttttccctcgaattcggtgatcgcgttgccataatggagacctggctataaaccatgtcggacctctcaggttcgcaatctccgatccctcctcctccccctccgccacaaaagtactccaatcgcgccgccaatgcccttgcgagattcgcccaacctttcttctcgggctcaagaccacctagttcccaaagcagtcgcgcggatggtccccggtcgatcagatccaaatcactgtaagtgttgccgctctatcacaccgctctgacacccctgctcccgtgggttacttttccctcttttgcttttttttttacggatgtagtgaccaaccccaccattcggtcatcggagctagtgtgatcgggcaattgcatctgagccaatggaatcttcaagtttctaatatttgcttctgtaaagaccaggagaaccgcagactgtaacccacaagacaggcatcgcaatcacggctttggacatctcgcccgagcggacacatgcggttatcgcaggcaaggagattctcaaaactatccaggtctcgccagaccgctcgtcagaggaattcaatattcgcaatgccgtcattagctatgcatctacccaccacgacacgggtgtttcgatgccacacaaggatcaattgaatgtcaaggacgtaaaatggtcacatgggaaccatgaccggataatcgcaaccgcagtcgcgaatggtcggattgtcatttacgacctacatcggcccggcctgcaattgtgtcgtttccagggtcacaatcgccaagtgcataggcttgccttcaaccctcatcttccttcttggctgctgtccggtagtcaagatggcacaattcggatgtgggatctgcgatccgcctctgcaaatcgcggaagttcaacgtgcggcagcaaatatctgtatcagggcaacagcgatgccatccgagacgtccgatggtctcctaacgatggagtcatatttgcgactgcttcagatagcggcgcgatccagatgtgggattaccgaaaggccaatgctccactaatgaaaatcgctgctcatgatcgcccatgcttcgcagtcgactggcacccagatggaaagcacattgttagtggaggcacggatcgccaggtaaaggtctgggacttttctttatctgcagagcgacggcagaaaccggcattccaattccgaacgccacaggcggtcacaaatgtgcgatggagacctccctcttgggttggtgagtctgcttcgggacaatggcaatcttctcaagttgtcacgtcctacgacaaagaagacccacgcgttcacctctgggatctccgccgcccgcacattccattccgcgagttcgaccggtacgacacacccgcatcggatttgctctggcgctccaaggatcttttgtggacggttggcgaggccggggcgtttacccagaccgatgttcggtatgcgccaaccgtggccagtcgccgaccgatgtgctccgtagcctggagtcccactggcgaatttgttgcgttcagtcaacaacggcctaggcgacgtcctctaggagtcaaggccgctgaatttctacggctcgacgatgatgatgacagctctggcgagagatcactaagtcaaagccccgcagatgacatctttgatgaagccgttttggctacttcccttcgaaatcggcataacaaatcggcctcgattcgaccatccaattcctggggcagtactccgcccggcggagtagattacataccagtgctccctctagaacaagcactagccaaactcgccaccccaatgcctagccaggtcggaatcatcacaagtattccggatgtcacgaacgactcagccgtctttcggcatttggcaagccactatacgccgttgatggatgagcacagcgaacataaaacgcagaccgacgtcctgaactctttgattgagtcactggaccataacgcagaatgtgcagatgaggtgtccctggccagattggctcagacttggagaattattaaatacgccattcttgaagagctccaacgtagagctagagattatcccaaaggtggtctgaaagataggccatccaaggatgggggcttgatagaaaggtcacgacccgatgatggtcggcaggacagagtgaaaagtcggttgttcaaagccgtcatggagacggtccccgaggccgagagctcgtcaaatatgaccacaccccttgtgcgcccattgccagattccccgaaagactcgtggtcgagcactgattcccaaatgccctcgatgagcgatgcagtgatggaccttgaccctctcccgccatccgtcttgagtgatcataatagttgggcaatgtcagaccgtatacttggacgacaatcatcaaccgatgacgctcattcttctcaatatcgatgggatcctacacaagaagatttggacatagagcaacggtctgcgcctcgggcaattgccggcaaggcagattggcgccgtcgtccagacttctcccgcgaaaattccgaagatgactatgacctgaagctggaaaacaaacgtgcagcgattcgtgactacaagcaattccccaaaaaaccgttgaccctcgaatcaccattggaatttaatcggcctcctcgtcctgaccgttttagtcgacatgattcctcggagagttttcccatgttctctacatccaccgacagttcgcacccatccaagtctattggtgcatcgtactcgtctagtattgaggcatctaaatccctggatcctgggcaatcttccgcagcgctgagaagagggtcgatgctagcttccacacgcgaggaatctgaggatgagctcttcgaccagctcatctcagagactgaccgaattcatttggatcgcccatcaagcccactccctttgatcacagaatcaacgccccttgaaagacagcaacctttcccacgagacgataccctcaaccccggcaccacgccttattcaacagtgggcggtatctcgcgtgtcccaattccactcacgccagacggaacagacctgaaaccgtggggtattgaagcaattatgaaagaatcagttcgatattaccacagcagcagtagcttagttgatatccaaaccgcggaccatctcctccagaagatgcacgttctttttcgggactgcgaacaaattctcccatatgaagaatgcgaaatggtcttcaaaacttacaatgagcatctaattcggcactcgatggacctcgaggcagcagagctccgcttattttgtgtgccaacatatcctgccgtctacgaatacacccaggcagattcattcatcaacgtctactgctacacgtgtcagcgaccctttgaaaaccccacccaagataacagccgctgctatcgctgcaacacacctcaagcaccatgctctatttgtatgagccttgatccacccccagaatgggtttcagagcagcaaactccgccaatcgcttcatctaccctcacgagtcccgacctagacttcgaaaccacttcgaaccattcgtcacaatcctcagttgccactgaacccgtcccagcatcggaaatcgatattatggagcctttcaccgtaccgcgacccaaagggtccgccctttggacctggtgccaaggctgcggccacggcggccatgtagcttgcatcacaacctggctcgttgacatttcaaccagcgaaggtggctgtgccacagccggctgctcgcatgactgcgggcctggcccacgtcgcgaactgaaccgccaagacatgcaggcggaatccaagcgtcgcgactcggctagtcgctccgccggtgtcgggctcgtcaagcgtgatccctggagtaagggtgaaagtaaggccgtcgaaaaagtgcgcggcatgctgggtattgccggcattgctgctgccaccgggggcagtggtgctggcccgaacacttcgacgaacaatacttctccggcgccgggcgaaaccggcgccatgtcgcctaaaagggtgcgtcttgttaccccgattgagcaagataagggaagtgttgccccggatcgcatggatcctccttcaagggactgagcttgagtcttgcgtaacactctgtgtaccattagcgcggttttttttttcactttacgtcttcacttcttttttgtcttcttcttctatttgattccccaatcgcgatacttcaatgaaacaatacacggattcaagtacacgcgtatggcatacagtgtacagccctgaaatgcatttattcctagcacataatagataatgtgtcgtatgtactcatagcaaccttcgccggattgcttgaaaaggacttcaacacattcttcaaacataatatccccactctccttcgtctagaacctccgcttcttctttgcaggagcttttgccttggcctcgagcgacctcttcagttcctcgcgcttccggtcagcgcgttggtcttcagtctccggttctgcaggtggagctggagggatcttctcttttgctgatgtgggcaatggagactcctcctttttaagagcttgtcggtcagccttcggtttagcaggtgtagctttctcgggtgacatgaccaccgtgtcagatgtaggtagcggcgacttatttcgagcttcctcggcagctttggctttggctttgccgcctatcatgccaagtttcccgggacgtttagcttttgtcgttgctggtaccggtatcgacgatatcggaagagaaggatctctgctaatcctttcttcctgttctggtgactctgggggtccttgggattttggcgagtcgcgggcttgtgctggaggggaaggggctggtgaaagcgagggctctttcgcttgctttttcttgccgcctatcatgcctaatccgccctttggctttttcggtgtctctcgaacttgcgctggaggagaaggtgctggagagggagatggtgaggcccggcgctctggttctttcttgttcttgccgccaattttacccaacccaccttttggtactttcggtatctcctgaactcgcgctggagaagggactggagacggagatggcgagggcttgcgctctgtttctttcttgttcttaccaccaattttacccaatccaccctttgttactttctgcgcctctcgagcctttagctctggtgcggcgggccctcgcgaccttaaaacgctaggaatgtgtctttgacgaggtgctggctcagactcggattcggagtctgatgctgtggcttcgtcttcctctgaaggcaatactgacgggacaggacttttctctctgggcttttgcttgggtggtaatgcttcgcctttgccatgttgggatttgagtctaggaggagtttcttgtcgctagatgaacggagttaagctatacatgttattgtgattagggataactcgtagcatacctgaaactcatcgtcatcgctactcgctgttgagtctgctcctgtgtcgatgttcttgatttcaactggctttgttctatcttggtcgttggaaatttcctcttcgatgggagaggcctctctggcgctagtttcagggggtctcgcaagttgctgccaccattcgccttgtgactgagtgaaagtatctaaagcacgagaatcaccggattccgagatctcatggagtaaattggtagctagtcccgcccgatgtgataatgctctctcagcgagccaagtctcctcctcaaacggcgcgatacctttcacagatttagcagcatcagaacgcgtaatagccttgcgagacatgcgcgaccctgcagcgctaggaaacactgaccctagatccacgccaagtgtttccattttgtcaaataacttgccaagtacgtagtctttctgtttgatttggttcaagagcaaacgttggcgggactcccactccgcctcctctctcaacagcggaagtaatagagtattggtcaaggacgacaggggttcctttaataacttcaaagaccacttgagaggtttcaatggggagggcagcttggttgttgtcatgatttcaagggagttggtttgtgttccactgcttaagattgcgctttcattgccattttgcaaagcttctccaattgtttccaggagcacatcgagttgttcttggtcctctccaggatcgatcgttgtgacatcttcctccgctctcttggtgatagctttacggggtagccgctctgaccagatataggtgaggtctgttatgtggatctcatagccttgtcgggtccaggtgtactggaagagcaaaggaggtattccctgctgggacaagtgaagacgctgccatctggaaggcatggttgcatgtttggatgagttgttgatttaccaatgcggagttgtgaagttccaaagttgtctcatatagctgcctaggccataagggaaggtttgccgcccgctcgactttcccgctgatctcccgaactgctaacttcgtttccaacatccaaattacatgttcgggtcgcttacgcttggatcctcaatcctccttatatccttacagttcctacgatgtctgcgcgattcccaaaccgatccgactcaaagcgcagcaggtcgcgatccccgtcctcgtggggtcagccccagaaatatccccgtcgggacgacggagaatggcgcaaccaacaagactcggatcgcagatggaacaatgagagatcaggcccttcgcaacagcctcgcaacatgcgcgatcaagtaaggctcaacttgatccaggaagaccagcaagagcgtgaatgggtcgcgcaggaggatgtgttcgtgctcaagcaggccaaaaagaaagcagagattcgagtcaaggaaggacgcgcgaagcctattgactggctgacagtcaccctccgcattatcgatcctacgcgtgatcccttggatgacgagatagcagactccgatctggatgtcgtggacccggacggtgtgtttgagggactatcgcagacccaactacaggacttggagaaggatattgatacatttgttaaccttgagacaaacgcaaagaatcgtgaattctggcaggtaatttttatactttctgctatcgactgggccgtcctgctaaccaccgtcccccacagactatgaaagtcatctgtcgagatcgtcaaaagaccattacacccgagagtcgcgcattgaattcagtggctgctgacattaacaaactactgagcccaaagtcctacgagcaactccaaaacctcgaagtgcaagtgaaacgaaagttgaactcgaacgagccgatcgatacagattactgggaagagctgctacgcagtctggctgtgtggaaggctagggctagtctgaaaaatgtttatcaagctattattgatgagcgtgttcgcgacctgaggagacagcaaagacaggaagccgaatcaattcgggaaaaactagcacctcttgctccggttgtcacggcggatgatacaacaaatcctgatgagttcgagggcttggatccagatccaatgctccagattcgcccggaggacaaaggcttggaaaccatggacgagtccgtatttcttaaccaagtggtaggtttggggcttcagctcatgcatcccaatccacattctaattaaccgcacaggcccgcgaacgccagaaaattattcgtatgggtttcgtcccactacggcaccgagctgcagagaagtcctccgcgatagtgtcgaatccgacatctaccaatgcccccacgacctctgtatccacgcggttctcgtccatcccgaatgaggacttctcgcaagcgaccagagcgctatatgaaagggagctcgccaagggtgttagtgagaatgaggaaatatttacgggcgaagaggccgtgagcacaagctcacaatctcaatgggccggtaagcatcgcccccgaaagccgcggtacttcaaccgagtccaaatgggttacgaatggaacaaatacaatcaaactcattacgaccatgacaacccgccacccaaggttgtacaaggttacaaattcaacatattctaccccgacttgattgacaagaccaaagccccgacttaccggattgagcgtgagaacgggcgcaagcgtggcgagtcatcggccgaagcgggcgaggaagacagctgtcttattcgattcatggctggacctccgtacgaagaccttgcttttcgaattgtcgacaaagaatgggattatagtgccaaacgagagaggggtttcaagagtacatttgacaaggtatgctgtgttaccaaatgatcccccctgttcctcaactgacgtaatcctttcctttcagggaatccttcaacttcacttccagttcaaaagggtaagtcgattttttctctcttacggccattacgaagataatactaacagcttgtctcagatctattaccggaagtaatacatgcacgaccaacgatttccacatgggcgtcatatcgaaatggagagagtgggttatggtgtatgcagggagatattcggggggtgtattttccagtaacttgatacccagtgaatcaaattaaacctggattgattggactggaaacatttccccgccaacgttctcgcagaataagccggactttatatcggatatcagatgcttgatccaactgcttcctaaatttgatgaccctatcacctttcctttccacctctatgatcgtctttcagggggaagccaaaacattcctcgctcgccttgatcccgactgacgtattggcaccatatgtctattttctcttttatttttctgctaccggggtatttgcaacacgggggacgttggggatgtcctctgggtgacactatcccggcctgcaggagcaggatgtattcctcacttccggctggctagatgcaggctatgaaaaaaagaacaatttgatacaaaagtagaataccgcaccggtttgcagtcaacttctagaaggcccgggatgacgccggtgtaggtgaatgccctgcaggctcccatccgcctatttgaccctttgactatccccttctagctctaggaggcatattccattcgcactagtcgcatgtagcatgtaacatgtagtaccagatccagccactttaacttcctactcattggccattgtctgtactatgaatctccgttgcacgacttgggcatctaaggtctttttcagaatacagagtagagctcctataatacaagaaaaaataattccattagatccagatcgtctttttcttggagttaaatgcatctatgaggttatttgcagagaaaagaaagaataagatgtgttggtatgggatctttgaattatacagctccaaatcatctgaagttgaacacacacacatcctttgaggctgcactcttatttgttttcctccccttcccattcttattttcattccctcctcttcctcttcctcttcctctgtctccaagatttacgtttgccttctcatatcatctcccacacttccatgcttctcttgcatttcccttgctactcttctgtcatccaacccatcaagtcactctcgcaactggactttgtcttgcccaaacatggatttcacattccattcggatcacttcgacagagtgcagctttcagaccaagaagactccaaacctgatctcccgtcgcaagcacaagcgctatctcagggtactggcaatgccacgatgaatcaattcagcgtccctgactgggcgagatggagatcacagccagctcccatccctcctcgatattatcaaggttcgagctattcccgtgttgctgatggcgagccatacggcttaggcccgttgtctcaagacctcatcggggatccaaatggatatctcaattcataccgctcgcatgctacccccaccttgactggtacaccgtcggggttattcttccctcaggctggagagagccactcagattggccacgcctgcgacctcctcatgtcttcagagaccagccatacaactaccctcagttggaagctcaaccctttcaagactccccactgtcgccgtattccgatgcctcctatcattccccgcagtcgctcgctgcttcgagtccggcaatgacagctcagacagcagaccgtctctcaccacgttcaagctctggtgacaatagagaagagcgtcctggccaccctccgtattctgttctcatctaccaggccttgaaggatgccccgggaaacaagcttccactccaaagcatttactcttggtttgaagcgaacacggacaagggtggagaccccaacgcgaagggatggcagaacagtattcgccataatctctcgatgaacgcggtaagtctcattcttcataactcttactttcacttccctctttctttcacttccttgttgcaatatgtttgattgggcgtctgctatattcgatatcaatactaaccttaactctagggatttgaagccgtgaaggaagaagttggacctggtaagaaagccgtgaacttctggagactgacgccggaagcgatcaacagcggtggcatccaatcgactacccgataccgcaagctccaacaccaaaagaaaggtgtgagctcaagccaacgtgggcccgcacgtcagccatcggagtcgaagggagtccacaccacgaaggtggtcaagtcacgcaacaaagccagcgcccatggcgagcgcgctgaggcacatcctcaggaaatgaccagcacaaatcctagtctggggagtgaatatggtcccacgagccttccagcgatgcaaagatacatgcatcaccctatgggtcctgttgtcggatgcacccccatgacacctggcaacgatgcgctttttgttgataccgaggaggcagggccggcatttgacgcggggcataactatgactggtagctccagagtcgggcttccacgctcgaaggtcccggtcgaccatcggcgtgagaattgaatggaaaatggaaaaacaaaaaataaaaacaaaaaaaaggaggggaggggagcggaggtgtggtgggagggatggaacaagattcagcgaggagaacccgatggttatgttgggttccctttcgggtttggttgtttttgcgcttttttacttgggaatttcgtacactaggggcatggcgttatttgaggcgttgtttgaattcagaatgtgtttggcgggcgttccacagagcgagcatcatggcgaaggagatcgatctactgtttttcactttttcctcatgactacttttcttcttctgcttcttttctgtgcctcagtcattctggcatgagcaacgcatattttctcttcaagtgtaccataagttagtagtggtgtttgtgagttgaattcgtgggatctaccacgaaggcagagatggtatcgaccatcatttttctgtcatgttcatcaatggatcttctatgagacgctttggttgaagcatgcatatatctgtatttcctcgcttgtctcgagtcccacatgtctttagtttattacaaatgtgtgtcattggtatttttaggcatggacaatgccaaaaaaatagaaattagtatacctctactacccagtccctgggtttccgtacagtaaatattgaatcccccgggccaatatattggagttgttcttgtccgtagcggactacatgctgtactgctgacaatgcttcatatgcttgcacggtggtgtctcaagtgacaggaatagcgtcccaccatagataaatgagaacctgtgaataacactttgtttcttatatggtatattttcccgcccctctttgctagtctcctttagtctctattgacacttgggctctgtgcttaattagccacgctgagcaatcccaccaataccccgctataccactctgctggcttgggtagtaggtcagggtgctggggtgatgcagacatccttggcagcatcggctgcatcggttgctgcatgttgccttgctcatgatcatctttcctccctgtcattccccaatttccccaagaggacggagtccgacaccctcgtttttagctcatattttgtggggctaaagcttcttttttttttaccagagtgtgttcccaagtagatcaaccctaaggagatctcaggcaagatataggagctcaattgtagatatgtcatgtgttatagttagggcatattaacatactacttgcattatcattcccttctcaagtcactatcctccgcaaggacacttatctacaggtttcgtagcgcagtcgtagctcaggcacagccccattgttcaatctagatccgagaagaccacgttatatgtatcaaatcaagcccaacccgggttcatcctaaatcgattttgatctatcgaattatgtcggaaaggaacaggagaaaagttatatactctgcagatctcttaatttttaatatgtatggcatcaattgatacgggtacggaaatgtcacttgcgtatgtacttaatagccgacgggttgcccagcctgctggaatccgggatttgcagacatattccggtccgcatcaggtttaccatatagtttatgttgatagcctttgatagagcggttgtatttgaatatataatatgatgtaaccatttgtcttgtattctgacttgctattcttctgacagaacacgcacgaacctcgcccgttgggcgtttgcgggatggaacagcccagttcaatagctgtcaatcctgcaaacgctcgagcttcctttgataagcgccaaccctcggagtggctaattttacggagcaatgcgacacagaacaatcgcctgaccgcttcttgggccgatcccaattgtctgttgtcatccgtaaccctagcatcatagagtgaagattcttcagttctttgctttttcatagtaaagtaaaagagacattcggatcctggccggctactcattctattggctgcttcagaccaccgggaattgatcgaatcacagctgtcatgcactttacatatgcgttacgtacttggtagaacaatggaagtatagggatcgattccattggtacacctttagcgacttctttcactatatattgagctagacttggtggcatagagatactatatctcctttcgggggatatctattatatcgtcacacgctagcttatgatgtatgttgatggataaaatatgaaggaaaataccagatgaacctccagattccacgagagaaatccgtagttttgtcccggtcttgccaatcgtgcttccgtccaggctcttttcaacgatggaagcatccaagttctcgtttgtacagcaacactggcctgtggtatcaacctccccgcccataccacgacaatggagatctatcgcattctgtttcatcgtaatcctcaacagatggtgacaatttggcatccgcattttgtacctgatggatgtccaccaatcagatctcaaaaataaatccaggcgttcaagtaacacccacgctcggaccgagctcactgggtcttgctctagctgccacgaaggcatcatactatattttacttccgtttgaaccttaagttaagtaaccgtcctttttatgtagtacatgtacttgtaacgataaagctggcgataaactcggtgtatcttcaaccaatctcatatgcagcctcgaggaggtcaaggcacaaagaacctgcaagatgaagctcctgcctgaaagagtagttcaagatatcggtaatcaaggataattatgccactatatatgattttttcttcgattgattaagtgcaggaaaaccaaattgcttttcattgtatttcccgatatattcaggactagccaacatgacgttgcggataacacctcaaactagattagatgctctgtagtgaaggcctgagagcctggctggttttatttaaccctaaacctaacgcatgcctggtcgaggtctcaatttgctaaagagtcaaactccgcggacaaaaaaagacccccacaattgttgggacaacattttataatcgtctatactgtagtagtgggtagtagtaaggagacccttttatctttccgagattacgaggtgagttgcttagcgaagaatgccactgcttttcataacaagcatcgaatttgagtgaagccttgttgtcattggaagatcggtatgatagaaggaggtgcacgttcatgtccaatgaaggtgctttcgaactgggaatcctgttttaggtggttgcgagaacttttcggattccgtgattccgtgtctttagcacccaaaataggagcctctgagttgatttgagaaaaaagggaaaaagttggtatagacagcaaggatgttgcatgctcttctcttcatgctgcaaaaagggttgtggttttaaaagacagcctagaccaatacctcaagtttctactatatataaccacgatatatattcctacattattgatgcaacaggggctgtgatagccttcaatattagacaccatatagactcacagctgtgtcttgttcaattacatgaccacctactatgctgagtgagttgacctcttgggttcacaccataaaagcaaggcttaaagtaattgaccagaccatgtggggtcctaatccgaagaatgtatatgcaatggagggtactaatgcaactataaatgagatcaacaccgagatatacttcagccctggagaataggcaaattacacccggctacggtggccaacataaaggaaactattgttctaaccattcacgactacattatatccaagcctgagtgcctatgcctggtgcagatcaacagatgctgctggcctgaaagataatgcgcaaccttactcaaacgcgtcatcaagcttgacaccgaacaagcacgaaatgtacgaggcttccatgcgagaggcagattcaagacaccatggagataattttagacaacttgattcgacatgtcaggggatctctcatgaaggcaaatgaaattaattcatttgcttagccacgagccttttttttggactcgcatgctagctgttcctgttcatctttaatattttaagagaaccattcccagccgtttttcccataacgttcgctccaccgtaaaaggacaacaccgacaaaaagcacgcttagcgcttggcggccttctgctgggactccttgaggaccttcttgacgatcttctgctcctcaatcaggaaggcacgcacaatgcggtccttgacacagccagcgcagcgagagccaccgtaggcacggctgacattcttcttggggcgcgagatctgagagtactcgcggggacggagggcagggatctgtaagtaaaaaaaaaaattgtcagtcgatctgactccgaaattcagcgagacggttgtatggaaattgtagcgtttcggtcggccattcgttcgcatatccgtccatccagacagagttttttttttcaagtcgttcggttggcccacacgcgatcgcacatatcccacacaaccgttcaaaaatgcatcagggacgccgggggagtactcacaccggggagcttgatgccgcagtcaccgcacttgggagcagtacccttcttcttcaggtgaaggtaacggagctcgccgccgggggtcttgatgatgcgaaccttgttggaccgcgtgttgtacctattgaaagcaagaaaatccgtcaataacttgttcgaaaaggtgatagccatcccgatatgagaatcatcgtatagatcatggtggtgcgagggagtggccttggaaggaattttgaaacgtacgggttccggcggcgctgaaaatcgagttagatcaataattttccaatcggtattttctcatagaactcacgtattgcaatctgttgttggtcatcttgactgtacttgaactggtcaagggcggcagttgtcggagttgtcgtgaagcagaatgaaatatgtcgagatgggtttgtgtgggtttctgcttcaaccgacgctagcgcagatttggcgaggctgcgctagtcccgatgcggaatagtgccagtcggagccgccacttctcaaagttcgacggagaacaggagcagagatagtcacatcgcgtaggggatctggatctctatctttgtcgcgttttcatcttaatcttccatcccgccatcacctagctctttttctttcagttgtattcttcttttttactagctgaaaagtcttgctacacatgacctccaacttggcttgacgcgacttggaaccaacacaacctctacgagggagggttccatccatcaatcacgatcatggcctcattgcctccccctcctccacctccgggatggagtgcagctcctcctatgccgatggcgccgccgcccccgggctaccaaccaccagccgacccgaatgtcgcaaaatttgcgcagaagaaaaatgaatggctgcgcacgcaacgcaatcggttcggcgagaagcgcaaagcaggatttgtcgaaacacaaaaggctgatatgccaccggagcatctgcgaaagattgtacgagatattggcgatgtttctcagaagaaattcacaaacgagaagcggagttacctcggtgcgctcaagttcatgccacatgccgtcctcaagctgttggaaaatatgcccatgccttgggagtcagcaagagaagttaaggtgctttatcacgtcaacggatgcctgactctagtaaatgagacgccgcgtgtcatcgagcccgttttccacgcccaatgggcaacgatgtggatgtgcatgcgtcgggaaaagagtgaccggagacacttcaagcggatgcgtttccccccatttgacgacgaggaaccacctctttcgtggtccgaaaatattgaagatgttgaaccgttggagcccattcagatggaactggatgaggtcgaagatgcggcagtttatgaatggttctacgaccaccgtcccctgcttgataccccccacgtgaatggaccgagttacaagaagtggaatttgtctcttccccagatggcgactctccatcggctcagtcatcagattctgagtgatgttgttgaccagaactactaccacatgttcgacttgaacagcttcttcacagctaaggccctcaacgtggccattcctggtggaccccgcttcgaacctttgtataaggatatcgatcctaacgacgaagatttcagcgagttcaacgccattgaccgtatcatcttccgtgccccgattcgaaccgagtaccgggtcaccttcccctttctctacaacaccctgcctcgaagcgtcaaggtcgcttggtactcccatccccaagtggtctacgttcgcaccgaggatccaaacctgccggctttctatttcgatcccgtcatcaacccgatctcctcccgctccgtcgcacctaaaaatatcaccgtcagccacgaagacgaaatatttgggcctggcaataatgaagacgacgaatttgagcttccgggtgacgttgagcccttctttaacgacgaagaactctacacatccgaaaccgcgtccgccatcgccctgtggtgggcccctcacccattcgataagagatctggcaagatggttcgtgcacaggatgtgccgttggtcaagcaatggtacttggagcactgtccacagggtcagccagtcaaagtccgagtctcgtaccagaagatgctcaagacctacgttctcaacgaattgcacaagggcacccccaaggcccagagtaagcagaatctcatgaagactctcaaaacgactaagttcttccagcaaacatcgatcgattgggttgaggccggtttgcaagtttgtcgccagggtttcaacatgctgaacctgctgattcaccgcaagaatttgacatatctccaccttgattacaacttcaatctaaagcctgtcaagacattgacaactaaggagcgtaagaagtctcgcttcggaaatgctttccacttgatgcgtgaaattctccggttgactaagctcatcgtcgatgcccaagtccaatatcgtctgggtaacatagacgccttccagctcgcagatggtattctttatgccttcaaccacgtgggccagcttaccggtatgtatcggtacaagtataagcttatgcaccagattcgttcctgcaaggatctgaagcatttgatttactaccgattcaactccggccccgttggtaagggccctggatgtggtttctgggcgccagcttggcgagtctggcttttcttcatgcgtggcatcattcccctgcttgagcgctggcttggaaatctgctttcccgtcagtttgagggtcgtcacagcaagggtgttgccaagacagttaccaagcagcgtgtggaatctcatttcgatctcgagttgcgtgcctcggtcatggccgatcttatggacatgatgcctgagggtattaagcaaaacaaggtcaacgtggttttgcaacatctatcagaggcctggagatgttggaagagtaacattccttggaaggttcccggcttgcccgcaccaattgagaacatcattcttcgttacgtcaaaagcaaggccgactggtggatctctgtcgctcattacaaccgagagagaattcgccgcggtgccacagttgacaagactgtagcaaagaagaaccttggtcgactcacgcgtctctggctcaagtccgagcaagaacgtcagcacaactatttgaaggacggcccttacgtttcctctgaagaggcggttgcaatctacactaccatggttcattggttggagtctcgcaagttctccccaattcccttccccagtgtttcctacaagcacgacaccaaaattctgattcttgcactcgagcggctgcgcgagtcgtactctgttaaaggaagactgaatcaaacccagcgagaggaattggctcttatcgaacaggcctatgattcccctggcacaaccttggcgagaattaagcgattccttctgacacagagagcgttcaaggaggtcaagattgacatgaacgataactacaacaacatcaatcctgtctacgatattgagcccatcgaaaagatcaccgacgcttatctggatcaatacctttggtaccaagcggagcagcgccatctcttccccgcttggatcaaaccttccgactctgaggttccccctttactcacatataagtggacacaaggcatcaacaatttgtccaatgtctgggagactgccgaaggcgagacgaacgtgatgatcgagactgagctgtctaaggtctatgagaagatcgatatcactctgctgaaccggctgctccgtttgatcatggatcacaatctggctgactacattacctcaaagaacaatgttcaactcagctacaaggatatgaatcacaccaatagctatggactgattcgcggtctacaattctcgggcttcgtgttccagtactacggcttgatgatcgacctgttgctccttggcttgcagcgagccagtgaaatggccggccctcccggaagtcccaacgatttcttgcaatttagagatcgtgccactgagacaaggcaccccatccgcctgtatacccgttacgttgataagatctgggtattcttccgattccaggctgacgactcccgtgacctgatccagcggttcttgaccgagaatcctgatcctaactttgagaacgtcatcggctacaagaataaaaagtgctggcctcgcgattgtcgcatgcgcttgatgcgtcacgatgtcaaccttggtcgtgctgttttctgggacatgaagaaccgcctcccaagatccatcaccaccattgactgggatgatacattcgctagcgtgtacagtaaagacaaccctaacttgctgttctcgatgaatggattcgaagtccgtattctccccaagatgcggaatatgaacgaggagttctcagtcaaggacagtgtctggtccctggttgataactctaccaaggaacggacggcacatgccttcctccaggtcaccgaagaggatgtccaaaagttcaataaccgtatccgacaaattctgatgtcctctggttcgaccacattcaccaagattgccaacaagtggaacactgctctaattgctcttttcacttactatcgcgaggctgctgtctcgactgtcaaccttctcgatactatcgtgaagtgtgaaacgaagattcagactcgagtcaagattggtctgaactctaagatgccgtctcgtttccccccggcggtcttctacacccctaaggagcttggaggtcttggtatgatctcaggatcccatatcctcatcccaaccagtgataagcgctggtctaagcagactgacactggtattactcacttccgagcgggtatgtctcatgacgaggaaacattgattccgaatatcttccgatacatcattccctgggaggccgagtttattgactctcagcgtgtttggatggaatactcgcagaagcgtatggaagcccagcagcagaaccgccgtctcacgttggaagatttagaggacagctgggatcgtggtcttccccgtattaacacgctcttccagaaggatcgaagcactctcagcttcgacaagggattccgactccgcgctgagttcaagcaataccagctgatgaagagcaatccgttctggtggactagccagcgacacgacggtaaactctggaacctcaatgcctaccgcactgatgttatccaagcattgggtggtgtcgaaacaattctcgagcacaccttgttcaaggcgacagctttcccatcctgggaaggtctgttctgggaaaaagcgtgtcttgccaagggaactcgtctcttgcgatacgacgggaccgagatcaatgtcgaggacgtgcgcgaaggtgaccaacttctgggccccgacggagagcctcgccgtgcattcaacatagtgaatggcatcgaccgcctgtaccgcgtcaaaatcggcggtgagaaagaagatctcgtggtgacgccgaatcatattctagtgctccatcgggagggagcctccaatggtcccaaaaagcaaaccgtggagatcactgctgccgagttcgctgcccttcctactgaggaaagaaatatgtacagtgcctttacatctcctagggttgagcagagcgccgaatcttcatctcctcaaattcacagtttcaagatcgagcacattagcctcgaatctgagaagacagagtgggctggtttccgagtcgacaaagatcagctttacctgcgccatgactaccttgtcctgcacaacagtggtttcgaagaaagtatgaaattcaagaagctcaccaacgctcagcggtccggtttgaaccagattcccaaccgtcgattcactctctggtggtcgccgactatcaaccgcgccaacgtctacgtcggtttccaggtgcaacttgatttgactggtatcttcttacacggcaaaattcccaccctgaaaatttcgttgattcagattttccgtgcccatctgtggcagaagattcacgaatcggtggtcatggatttgtgtcaagtcctggatcaggaattggaacagcttggcattgaggccgttcaaaaagagactattcacccacgtaaatcttacaagatgaacagctcttgtgcggatatcttgctcttcgcgaccaacaagtggaatgtcacccgaccttcgcttgtgttcgataccaaggacgtctacgagccgaccacgacaaacaagttctggatcgacgtgcagctcagatatggtgactacgattctcacgacattgaacgttacgtccgtgctaagtacctcgattacaccacggacagcatgagtatctatccttccgccactggattaatgattggtgttgatcttgcatacaacctcttctccgcttacgggcagtacttcccaggcctgaagactctggttcagcaagctatggctaaaattatgaaagctaacccagctttgtatgtcttgcgtgagcgtatccgcaagggtctccagctgtatgcctcggagagcagtcaggagttcctcaattctcagaactactccgagctcttcagtccgcagattcagctctttatcgacgacactaacgtctatcgcgtcacgatccataagacatttgagggtaacttgacgacaaagcccattaacggtgcaatcttcattttcaaccctcgaactggacaattgttcctgaagattatccacaccagtgtctgggcaggccaaaagcgtctgggtcaattggccaagtggaagacagccgaagaagttgcagctctcattcggtctctccccgttgaagagcaaccgaagcagctcattgtcacccgcaagggtcttcttgaccctctcgaggtccatctgctcgatttccccaacatctctattcgtgcctctgagctccagctgcccttccaggccgccatgaaggttgagaaactagccgatatgattctccgtgccactgaacctcagatggtactcttcaacttgtatgatgagtggctcaagtctatctccccgtacactgccttttctcgactcattctcattcttcgggctcttcacgtcaatatcgacaaagccaagatcattcttcggcccgataagaccgttatcactcaagaacatcacatctggccatccctgtctgatgaggactggatcaaggtcgaagtgcaattgcgtgatctgatcttgaatgactatggcaagaagaacaatgtcaacgtgcagagcttgaccagtagcgaagttcgtgatattatcctgggtatggagataagtgcgccttctctgcagcgacagcaggcagcggagatcgagaagcagcaagaagagcagaagcagctcactgctgtgactaccaagacccagaacgctcgtggtgaggacatcatcgtcaccactacatctcagtacgaacagcaatcatttgcatctaagacagagtggcgtactcgtgcaattgcgacctccaatctccggacgaggtccaacaacatctatgtctcctctgatgacatccgggacgatggctacacctacatcatgcccaagaacgtcctcaagcgattcatcaccatcgctgatctccgagtgcaagtcacgggttacatctacggtagctcccccccagacaatgaccaggtcaaggaggtccgcaccattgtcatgattccacaagtgggtaacacccgagacgtccagctgccacaccagttgccgcagcacgactatctccaaaatctagagccgctcggtattatccatacggtttctggcaatgagccgccgtacatgtctgcggcagatgtcacacatcacgcacgtctcatgaacgcccatccttcgtgggataagaggaccgtgaccatgaccgtttcttttactcctggatccgtttcacttgccgcctggggtctcactccggcgggctacaagtggggcgcagagaacaaggacacaacctcggatcagccacaaggcttctccaccaacatgggtgagaagtgtcagctgcttctcagtgacaagatccgcggctatttccttgtgcccgaggataacgtctggaactatagctttatgggcagctcttttggtagcgtggagaagagacctatctacgtcaagattgatacccctcttaagttctacgatgaccaacaccgtcccctgcacttccagaacttcgccgagctcgaggacatctgggttgaccgggctgacaactttgcgtaaacatgcgcagctgatcaggtgcaaaatccttttttctttttctaagcgtcgtcttttttcccctttggttccatttctttttgttcatttgtgttcttgtatcacgacaaccataattcatgtattgcagcgaaaacctaggaaaaaggccagtggatttttttgtacagtacgagttttcttttgcgaatacattttctgttcacttcaacctttatttctttttattccctagtaagtccctcctcctcccctgtaagtatacgaggatgcagttggcttcggaatgcggcactagcttacatcgccactttccctatgaagattgccgcgacgtatgtgatggcctaagcaggcgcccaatagaactatgtagtctgtacaattattgaaatcaatgtgcctaaaccctccgctttgatacatcggacctttctgttgacagatgacagcatgcagctagcacaattcggcagtccttccgaatcacatctccggatctaccagacaaatccaacggggaaagaagggcgcgaaagagagtgtatcagagtctggctgaaaagtcgatgtgaccaatttaacgatcatctcctccaataatctcttttgctgattgtgatattgtctttcttccctttccaacgttatagaactctgctgtcaagtccaaacgccaatattgttttcgggtatctgtttcatccccctgtcctctttgttctgttctattggacatctgtgattgactcccgcaggcctcagctccgaagaaacccggtgcaatagaatagcttgccatcgcttactcgactagcctataccgtatcaatcggccgatgtgatttgtccgcatcttttccaggacggcgtagctacgtggaatatcgatccgacgaataagctgatgtctgatttgctatgtccccgagcgaagtctgacaggcttcacctgtctgccgtgtctttttcttttgtcacggctcttgactcttgaccctagactaccctggtcccatattttgcgttgggttttgatccccattaataggcgctttgccaacaatagttttggggaggttctaccgcgtcgaaggttttttttgaacccctcctcttgatgttgggcgtctgtgcgaaacccaagagagagaaacactaccccatggccggaaagatgggatacaactgcgtatcccgagagaacttgactatggtgatttagagtcctcttgcagtccagtccactggagactgatggaatcagcccggcagcgcacgctccaacttggtcaccggcacacggttggatttcccccagaggactctccaggatgttgttatagataggtccttctcttcgtttttcgttcgctcttaatctaagaaaaaaatatttgttgttttacctaactatacattgtttatgaccgattcttctgcaaaacctgcctacaatttgacccaaagtaatcctatccatcctcttctgcatgtcaacgcgttgaggcctttctcgtctttgttgtggttatatacaggcaagtttctcttggcatcgtcctcctatgcaacagcagaggcttttcttttctttgcctttctagtcgaaagagagactcgggaataaaaacgccctgggatcgttcatctcccaactgctactcaaggcatttgctggggctgcaggtcctggtgttgtttttatgtctacagcaccagcggacccttaccgaggcttcatggttaactacactcctcatgacagtggcaaagatgcgaacggggaggatatcgtttcttacggcgcggcgcagttgctccaagataggcccgatggcattcgctaccactctgatacaacccagacgccctttgggtctccgtcaacttttatcacgaaccactcgcccgcacgccagccggtttcacattacaacacacatgggtatagactctccccaattcagggtagcagaaaacgacaacgtaccgacaatgagcccgaggcaagagaagacagtgatcaaaattatggttaccgacctgtcttgcaaaatctacccatgggtgatccatcggctcctgcaggtgaatcggccgacctgacgtacgctggtcatgccgttccttcatcttcccgccagacatcgaaccaggactacctccagtcctctttcccgcaacagcatcatcaccataggctaccaccccaagcatcggtggctacagcctctgctggccagggctctgaacagccgccactcgaccgcagcttcatgaaccttccaggtttgccggcaccataccctgagccaaaagcgccaaagaccagattcggtcacagggaagatgagatgttgatagccctgaaggagcactggaagttttcctggaggcagattgaatgcttctttccagggcgaaaacagcaaacattgcaagtccgttactgtaccaaattgaaggaaagggctgtggtttgggatgatgctttggtatgtttgcgccccacccaactaaaagaccggaattgcgctaagtcctaggacaggatcggaaactgaaaaaggcgctggaggactatgaggacaacaaatgggcacacatttcccggaagcttggacctggtataccaccagcggcgtgtaagctgagggccgaagagcttgagtgatgttggagtgtatgttttgttagtttagagggacttgtttattatactgtgactcgataatgcgtgttggcgtaagtgattgttttccaatatatcatgccaccccgtgccctacacagagaagccctaggtattccgaaacggatattctgccgctcgtagattgacctcgcaggccgccgtagagagctcctgccaatcagaagggctgactcatcatcagtcgcgctcctattggatgtcccggccagccaatcacaggcggtcggaccaaagcggcttcaaactcgcccaacctcaaacctccaaactccctctcctgccccaaacgccccgcgtcattcacaccattacctccaggacaatgttcctccaacgtacagcctccgccctcgccaggcgctcgcctgcccgcgcttttaccctcgcccagcggcccttctcttcctctgtcattcgctgtacgtgactcctcagatggcctgatccgaccttcgcacaactgctccaatcccgcgcaccccgaccacaaggggcgatgctcagtcaattggtctgaatcttctattatgaccaccagctaacgtgaaactttaatagccagcgacaagaagtgggctcccaagcaggagggcaagatcttgaccttcgatggttagtgctttacccgaccccatgccagtcaattacttttcttccggcctgtgcggctcgacaaggatccatatagtcacgcactcgagaatatgcgtgcaattggacgctatagaacttcgggtgctggtcatgcggatacttttcccgagccacgggccaggcttgtcattctacctcgagtggataactacaaaaaatctccaaaaaccacaatgctgacctatcttctcgatatatagagatcaagaccgaggatgacctctttgccccgggtgccaagcccggtaccattcccaccgatctcgagcaggccaccggtcttgagcgtctggaactcatcggaaagatgcagggaattgacatcttcgacatgcgtccccttgatgcctcccgcaagggtatgactccttaatatctcaagtttccatcgcaattcccgaatgaatgatcaaataccgggggaattgcgtgatcattacttcggggcgaagaccgagacattggctaacaaaatgcgtcgatttattcaggtacaatcgaagaccccatcatcgtcaacagcgccggtgatgagcagtacgccggttgcaccggttaccctgtagactcccaccaggtcaactggctgactgtatgaccgccccatccaagcccaaccgggctaatatctccagctctagatactgactatgcgtcttttaggtctctcgcgatcgtcccatcgagcgctgccgcgagtgcggtaacgtggtcaagatgaactacgtcggacccgaggaggacccccactcccgtatgtttcctgctctcttttttgcttatagtatatgataatctgttggttgtgctaacattatcaccctcagacgaagaccacggtcaccaccaccaccccgctcacgtcgagcccaagaccttcgccgactacgtcaagcctgactactggtaccggtaaatcttcagtgccgattttctttggatgttgcttggaaatcccaatacagtgtgaacattatgctgcgtgtctgtctttgttctgtctccgtgactcctacgtctcttttgtactatagtgctttagtagatggaatgtgagtgttggtgaggtttttacttttgacctatatctatttgggttcgtagttactatgatatgggatatcaccggtcgtgctgttagtaggacttcttcgataccggtgtagatgaaaagagagaaaaaaaatgtatttttgagtctatccatatatcacttttgatccaatgtacatgtatgtatctagaaaaatgcggtggtatatgtgaagcctcaacagggaggtaaatatgcaatgctcgtccactcatatgcttagacatgacatcattcatatatcatcagccaatgttcagcgacccacgaaacgaagttcgatgaatctgagaggagggtaaacaagcgcagtccaacagaacccgacgtaaattcccatctagagagtaattagttaggaacaaatacacacatgatgggagatgggatttaactcacatcagcaccgtattcgccgaccaatttggcaataggtccaatgtaccacagctgcgccatacacaatacggcgcccacccagccaacgataaaggcagtgaaagccgcaatgccaatgggtagctttgacggatcccgccagatgccccagttgtacccagtacggaggcggaagatgaaccgttcctcgaggacaatagcaatccaaatgacaacccagtagcccatcaaagcgaggaaattggtgaagatctcagagaggttgctgcggccaacgagcgcgcagacagtatagataatgacggcaatggtattccagatgacgcgcggtacggcctcggcgtagcgaccgaggatctggaagtcgatgccggcggagtaagtgggcgcgacggtattggcgatcaggcctagggcgcagataactgagcagaatttgccgaagccgtgcagcgggccgaatccttcgacgattagtgctccttggcctttctcataggcggcggaatactctgggaacgtgggtatgcctgaggctaacccgacgccgcagactagggccatcgtgaaggagacaagaaggcctgccaggcatagactgaatatcttcagccgagaggtgttttcggggtagtagacgaagaaatcggctgctagtggggcataggtgattgcggcactcagacagatggagaagaaggatagcctaggaccatgttagaaaaccgggcttcgattcttagttgtaagaagcagactcacctattgccagctactgtccgggaatcgccaatagaggtggttgacaagtcaaacttcacggatgacaccccgaaaaggatgcaaaccacaattacttggggcaaaaatgcgaatctaatgaggcccgtcagtgacattgttcctcatggcaataatctctcaagactaaccgttcatagtagtggaaaacttggatgccgaatgtggcaacagcccagctgataaccgcaatgatcacgatgcctataatatcaagattagtatcactattgatgtatgaagttttcggaatacccaccgacagccacggacatgccaccaggggagacagcagacaatatttgtccgccaacgacgcaatcaatcaagccgtatccaatcatctgaataaggttcaatagaacaatgatcttgctaggccaccagcccatcgaataccttccgaatgcctagtcaccgattagccctctcgatcaaataatagtccaacggattcaatatgtgctacgcaccaatgttcggatcccggaaacgggcccccatgtggccatccaagaggagacgatggaaccaactagagagccaaagacagcacaaagtgccgagtctaggaagttgagaccatagactgcaggccctaacatcccgagggtgatgttattgggtgcaaggttaatggagatccaaagcaagaagacttgcagatacgacatccacgtgttgcgcttcatgcgctcatccacggcaactcgttcgataccacgcgcttctaaattatactcgacgagctggttctcaaaagctctaataatggagcccaatcgtgatccaacgggattgcggcgattggtcgtcgtctcggggtaaagtgcctcatcgttgttgaccacgccgggactttcaggcgcgaatttcgtcaggtcttccttgttggagtgcaccgctaaggtggtgatttcatttcctgaagccatgctgcgattctgttagtatcacacctatttcctgaagagaggaaaagcgcattgagtcctttcgctggaattacccagatcaagtttaaccgtatattctcagaacgacgatagtcgaacaccggtcttcatgcaggatgcttgtcctagataccttgatcgtgagagattgccacactactcgtcttcatgatagccgtcctttgtggcacaggttgtgttaccttccgagagaagaggcactatgaccaacgtcagcggacttgatcaggcaatcacacaggcatatttcacctttgaaagcagaggatattcaaatccaaaacaaagtgagcagcaggtaatagcaggtaatcaattgatatgacaagcacccgatttccagggggggcaaaatggagaaagatttgattgccgcggggaaagaaatgagatagcccgctttggctttttccgccaccaccttacctgacatactacatccatagttattgtactagttacaacacacaagccattgggtttctgatttctgcttctgcaatttcctcggactgggaccagtgggaatcatatggtattgatggacacaaagcgcaaaaaaaaagcagcgctgtcaaaaccaaagcagacaacgcctgggagggggaagggaaacatgacggatcgcaaaacaaaatgcgcaggtgttcatatagcgcatataaaagaaattcgagaataatattgaaaaatattccagatcaccaactccatctgccttgtaaaatcagtggcctccagcggccaccgatgaaacttgcatcgctctggaattgcagggaatccggaggagagaatgccaaattcataaaagatgctaagaaaaacaatatcatcacttcgtcagaggcatcgtggtagtcagacgttcttgaaatgctctttggcatactgttcgcaagcctgtcggagaatatcgagattagatgcgatgcacaatgacatgcaggagattccggtgcttactttggcaggcttgcccactttctggccgatcaccttccacttgttcgcctcgtactccttgatcgcctcccgaagcttcacagactgtgcgacgtcaggaacggatgcgacaacggacattaaaaggactcgggatcatacctcatcttcggcaaattccgcgtagtgcatgtcctgcgcaaggtgtcagtaagacgagacgtggtattacccaaatcgcttaatattgcgtaccttataccaatgcttcttgacactgccctcggttcgggtcgggaaagtctgcgacgggtaagaaaaaaaaggcccaggtcagcaacccatagtttcagcctataaaaagccgcgcgcgcaccttggcaatttcactccaactgcgcccggcgtcgcgcattgtcttcagcctttgctcctcctctgcggtccatggggtattggtgcgtcccttcttcttaggcgtagactcaaccgtgggaatggcaccggagtcatcaatcacaccacccgaagggttcccttggcctgtcatcatggctgacgatcccgtgggagaaggaggacgtttgcgcgaagcgccggggttttgttgggatagagaagcagtcggaatcgggatgccttcaaaggttgggacgcggtggaatggatggatctgttgttgcgaaagcatatgcgggggggcgctggttgttgacgtcttgaggcgtttagatgtcgggggggaactaatcgggcaacaagttaatgaatagtagaaacataagatgaggtaaggcaatataataagaacgcgaccaagtgcacttgagttccaacccagtctccctcctacagctggaggccggacggagatcacagacgaagggacttacgacatggtgaaagacacacgcggttttcaatcaccctgtgccgattcatctgtacatacaaaaaaggccgcgtagagggaggggtggttagcaggatctggtactggcgcgccttggtcaactcggaagcgttacactagagacgatgacacaggcgcatcccaggcagaaccagattgacaaaggtaacagggacaatatgaataagtcgcgacacggataagtccagactccgaccggagtgatttaactcctatgtgggttggcagtcaaagggaagggctcacaggtcaaaatcgcatggtcgaagcgtcgattcggggacctcgaattcttccgaatatggggagaacatgaggctgggtgatggggttgactttgaagggaaggcaaggttaaggataggaaccaggaaaaaaagtagagactttaaaaacaccaggaagggagaacgagatagagtgcaagagagtgcgaaagagagagagacaaggttacagagaagagaaaggaggaagaggagaagttgttgtgaggaaaggcagagcggggatggagtcacctcatatcacaacaaccaaagtaataatagcactgaagatatcattcgagacggttgatacacttgatagagtcgatatggattctatagattatctagctcgtctattttatatggattctcgagtttctattgcttcgaggcgttaaatgcgtcgaatgttttggtttctttcatcttataaccaggccctctaactatttccctactatgtgacccctctattattctctatacctccgtctttcttagaataccccctttatattcatcttttactcccccaatatctaacgtagattattcatgtcaaattaaaattcagtgctgattcaaatgcgcctccaaccactccccctccggtgcattccacaacccgttcttctctggcctaggaaccgatgcgcggacaggggccctgtcgcaatttatgcctcgtcctgtgatccaattcgaccgacatcaagatgcagaagcaaagataactacgtccggcaacttccatgagacatttgggccgaagaaacccgcgagtggcctgttctagaatccggtgacccggcgagatctcacaacaccgtgcgaggatgacaggacacgcccaatgcgagtcaacgatgcgcccgagggcctaattattgcaaaggcatccagtggccccgggaatcatcccgcaatcatcatcgttcaattgacagaagtagaagtctccgtccaacccgagacttggcgggctagatcagccacaggacggtttcgtgtgaagccaccggggcacttcccctctctgccccccgtgccattcgttgatgatagaatatgcggtatggggtagagagtctggaggaccctatcagcatttatcttttgttttagcacggggttcatcaaaggcctgtatatattcaagaagcccagcctcttagaatccagctggcatttcctttttgtcacacacacagttcatccccttgttagtctccaattggtggcaattgacaagattgctagtgttcattcaagccgactaggactacagaatttcctggcattgtttgactcggagatatcaaatggtaatgatcgaatatatccggttaggtttgaagatgatgcatgcaaaggatcaggtgtgcttaatgtttcctggtgcggtatatcaatgcaacaagatactgccaagagtcgctggggttaaatatgacttgcatcaccccgttttaatcaatagaaaaggccgccttatcgaatctaggaatatcaagcccctagatcaacacaacgaaaaaagatacatattctatgcgtttcaacggatggctccaatattcgtgaatataggctaaaacaacaaaggcttctatcaatatgaccaattccttgctcattcacccggccgactgtttcgaccgttctgcgatgatgtaggatccttccggtcaggccaagcctcattcaaaatcagtaatcattacttctgggaatattggcaaggctaatcatgactattgggtaggtattcacgttacagcgattatatctgctttgggaatcccaccgcgtcacctgcatcacctagggcatctaggccttctcgaatccactacggtcataagcgcaaataaatagatcttggtcttgactagaatgtcggattatcggtatcactctagaagcttaagaagaacctcgaatcaaggtttgataactcaaaaatttatctcctaagcttatatatttgctcctaaacatccccgcatctttccttgttccagttcatctcctcagaagtgtttgagaacccctggactatggcttgctaagagcatgatcaatcacagtatgtttggcccttcaattcgattgtcaaattgtttactccgtatgtttcatatactaacttcacatgttgtcagtaccccaaatatgtacatcgagatcgcaatgttgaacagcacatgtcaaccataactggaggctaggcaaccaggtagaaaccccgagaatgccaactcttcctttgtctcataaatcaattcaccatatttctcgccgtctaactagttgaccagctactcgcgatttacgtgctgacgtcaacctcacgtgagaggacacgcggcccgagctcatgtggattgcggataacgaactcccccagtcactctaacagcgccatataccttcactcattgtatcttcctggacgttaatcccattttagggaacgtatatacgcagaaaacaagtactttattgcccaatctactcgagatttcttttttatcccattcctccagatacctggcgccgacctcaatggtgatagcttgacaagtgtccacacctccaactcattgtttgattgtccgatcacaactctccagccatggtgacctggaatgtctttcggattattgcagatttgtcccatgcaggctcaatatttatcctgctctgggctattcacaggaataagagcgccgagggttcgtatacctttgtataaaccgattacctaggtaccatgcagagcttactgaccaattcgatttaggcatctcactcctcacgcagttgctttacggcctcgtcttcatatttcgctatcttgatctactttttccatccacatacacgggaggcacgtggcacagcatctggaatgtctgcttcaagctcttttacctcatctcgtcctcatacctggtcttcctgatgatgaaggtgtacccacggacaagagaaagggagcgagcttggaagctcgctttgtggtctgtggtagggtcccttgttttggcccctatctccatctggctcttcgacaggtccgacagcaactcttctggttactggtttcttgaggtaagttgaacaagccggaagtgttcatatggtacagcttaactgatccaatcacttagttttgctgggctttctctatcattctggagtctgtgtgtgttttgccgcagctccttctccttcgccagaccactgtcccgacggtgatcgactcgtactacctgcttgctctgggctcctaccgagcattctacatcctaaattggatcgtccgcctttccaataaggagcccttttatgattggatcgcggtcgtatttagcattgtacagactgccttttatgtcgactttgcgtgggtgtactattcgcgccagcgagtcaagcttcgcaatggcggtgtcatcgactccgaggactatgggaacagttggctggtgaatcgtgtactgaatttccgggcctcgcgagcctctacagacgaagaacagcaccttcaagacgaggaggaaggggcggatggtcaatctaaccacaaccggtggggtgctcgtggtatttccatcgcagctgacgacactctggaaagcactagtcacaataaggcacatcgtgacagtttagatgggttttcgggagacgaggacgaaactgatgaccaccgagtgaacagttctcgctgattgatgatattctacggcaaattcggtcacagcatggcatatctacatgtcagtcaggttggtcattagatgttgcgcagggtgggctctaaacgtgttgactgcacaggaagacccgctcctaccgttctagtctggttatatccgggatttcatacccaccgtttgattatcgggcctttttttatggtagaatcaggaaatgagaaaatctacggagcaacggaatgttccgcattctggccccaagtccatggggaccttttttgctcaggctacaccgtttcacgctgctacccggggatcatttgatgtctgatgtgactagtagtccgctatggattgaatctcctttattctccaactacgctgtagtcagtagatatttactgtctcgattcgctccaatacacgggaaccggccgctacaccggtagtcacgtaccggggttaaccctgccgagaatattactgggatatcgtgcgtattccagcacccaaaggagcattgggccgcaacaaagtacatatgcatgcaccctgaaagatagctatcacatacgatgatatcgtaggaacatcaaaagtccccccaaagggcgcaaatgagaatagaccccagagctgacttgggggccaaatgcacttcccttgcaaaacgaaccagaagaaacatcccagtcctccaaagttggtttgtcactgtccaagattggtgggaatccatcaactcccaagatgcaatgtgataagaagatagatccaaaagaaatgagcgtattattcgaggtctagaaacgcctggctttttctcgggcggttagcagcaggacgtggcttggagagctgactccggaatcaaacgatcaccgcagatgtggagattggagattgagaaaaagcaaataaaataaaataaatcaatagcatcataatgaaagttccaggttgtcatgcattctcgcaatgagccgggtgtctgcatgagcgcttaagccgtggtcgtggattccccgtggaccgagtcaccaagcggctcgtggggttccatcagcctcagaaggacttcgggtcatccgtggccagtcgcgaaccgccggtcattgaacaacgcctctgcatgggaaatggagaatgcatggagattttatggagaatgtactttgtaaagggatcgtgatccctccatcttcccaataaccggtgtgttggaatctagtagcgtctagatgaggggggttttttttgcttcttcctttcttcccgtggggcctgccagattaaacaatattagagtagatgacatgacctgtgtcgaacatccttatgaagaggagcagttgcgcattcatgtctaactagaactaattgcaagatccggccatgttacaatacgctatgatatgctatggtatgctacaacatcctacaatatgctacaagataatataacatacaactattatattataatgctgactctatggtcattatagtttttgatgggtccaaaattcatgcactggacctctccagatctctaagcgctacgctttggctccttggaagatcatccacaaccctaagcaacacgtttttttgtttttttttcttgcctgctttttggcttttttgcatcttccttctggcccgttgcagtgggcctgggctcatagagtcaccttaatccctattcgcaatgcagagtctgatccccgggatggatatcagcattgaactaatgagcccgcagcgctaagacataggctctcgtcgagttttcatgagtttcccacgttctaatgcagctcagggctcaccggcggtagcgatctctgttttggtgcgctctgagcctatgattaattccgcgactcattgttcacatcttacctcacgaggcatcccggtgctggctgtgatatctccccaaagtggaggtatgggcggaattgtgcatcttctttgcttttcaatcttcccctcttttcttgctcgcatgaatcttataagatcaactgctttcggtggttgggaagttggattttctcttcatcattcagagcgaaaggcctcgttgatatacaccaacaatcccaaagcttcaaccatagtctgtcagccacctgcagtcccacatattcccctgcctcgagtttcatacttcgtttcacattctgctgcttcggcgtttattctccccactcagacaacgttgtcgaccgtgaatcaccccgtgttttatattccacttttccacctgagtcatgtcgaaccgctcggatatccccttcgttgaacaaatgggagagtactacgaaggaatgccagccgattggcctatgatgccagcggtatgtacctatgcacctctaagacaggacattgtatgcttctgcgacatgagctaaccccgtttacgatctagaccccgtacgtgggatgctacagccctgacttcgccgagcccctagccgaacccggcatgctgatgccactgggtgttctggggagctcgttccaccccggcccagaattcggttaccactctcagggctactacgcagatgcgcaccagcacatcatcaacgaccccctctctgccacagtgggtcttggtatctctgcgcccttcccagataatttcccccggtctttagcccccagtcccgacgtgtacgctccgggcccaagtggtgtccagcatggtgtgacagaggcgcctagccagtcgccacagggctccccacagggctccccagccaagcgtgccagacatcaatcctcggacacgtcctcgagcgagcagccgagcaatgccccaatcaacattgctcctaatccagagggtgttcgccgaatggagcaagaccgccagaatgtccagccctcttcccacgtactccctaagccccgggctccaggccgtggacggcgcgacccccgagcagagtatgaagacgcatttgtcgaagatctgcgagacaaaaagaaggcctggaaggtcgtgcgtctggaattcgaggagaagttccagaaagaagcctccgagtcacgcctgcagatgcgtcttcatcgccgctaccgcgagcgaaaggtgcgctgggcgacttccgatgtgagtgcgtaacccctcgcaacacatggtttaagcaatatgtgtgggctggaatgtacatgtgttggacaacccgtgctgatacgcaagtctactagatcgaacttttgctcgacgcccataggaactgggcaaatgacaaatttcagtatctttcagacaaggtgagatttcccatgtccatgttctatagagagttctaacatgtcttttcttcttctttagatgaaagagcttggtggtactaggtggtattcagctgatcagtgcagaaatcaacttcgacttatagaggcgaaagaacagcatgatcgcgggagtgaatcgccctctgttatgtctgaacctactcctgtgacacccgcacctgtggcacctgcacctactgtgtctcggaaacgacgtcgggcttcagactcttagcttcgagagccgttcgttgttttttatttcatttttcccttatttcatttctttctcttcttcacattctttccagcttgacttttttcttttctctttcagtcgcctctttctttatttccttttcattctaggatcaatctgatcgactcttcaccccgattcttgcccccactgtcgttatgattaagttagccttggatttgataggaccataggatacgcagagctgggagacattggtttctatcacaacattctttatatattttatttttatattttatctcagatctcattatcatcgctatcacgttcttcgtacatttactctcaagttcaacgtaggatgtagctctagtctggccaatttttcgacccgctagcatttataacgccgtagatgaggactacagagatgatactcgtagtcatggaagtttgaattagccatcgaattcccaaagctcctctgatgggtgatatcttagtttgttttacaatttggaatatctcccacgaagaaataatgtgtatgaataagagtggagctgagaaggatagcctgatgaaagttttattgcactgtcaagtactaaacccttactattgggccatgagcgtctaagtgggaaatagttccacttactcttagacagtataatcattaagaagaaccaacagcacaaagacaaagagcatttttagaaggctaagacaatttctaggacaataaggaagcatcccacgtgcaaaatagctaagagtatacaacaatggctctgtcaatactctgattgggaatctctaggcataacaaagcaaacatggtgagacatcagtccaattggttgttatacgctctgttgagacagcgaagccatctgaaaaaaagggatcttaccagagacaaaggctttgtgatcagaatgagatcagaatcggatcttttctctggatagaaggaaaagaaaaaggcaagaaaagtgaatcctacctgaaactagcctgaaaaatgaaaggcaagtcctccaagatctcaaacccagactaaaaactgtttcttcggtgctttgcataagaagacgggatgagaacccatttaaccatcatttccaagaacagcaccatccagcctcatcatggataccccagactttacaatgccggacgacgagcccatcaacgacgatcctagcgagaatggcccgaagcccaagaagactcgccgcagccgctatgacccagagcccgactggtcggccatggtgcgttccaaggtcacgaagtcccaacatcgtgttggtcaggcctgtgatcgttgcaaggtatgtctatctatcatattccgatacctcgtttgctttgactcagagcaccatgctgacgcgtttgaatcgatatgtagctcaagaagatgaagtgcacgcccgatcttagaggctgcggttgttgccttatcctcaacatcccatgcaaagtcactgaccgtgtcaccggtgagacctgggtgcgtggcgaggctgggcggatgtgcgctcttatcgagaacctccggaagcagaatatggatctaaaggagcagatcgcacagcttcagcagaagaattcacagctgcagaactgtctggacggctcctacagagccaatctcatggaccactacgaggtatgtatttattcatatctgctaggatccacatctttgtgagatatccacggtttgatgctaactcagttaccagccaaaccttgatcccagaaatcatcaccacagtctactgtgactgtgatgcccttttttccatgatttatcatacctcgtgggcttagttccgtgtttcctatttgtatcggtcctgctctggccgagatggagtgtataatcgagaagattggggtggcacatggtgacaagatttgtgttttttcggggtacataaatgaaaggagagttctcttacagtagatgagataatcaaatactttcgtctcatttccaaaatgatagtcaatggatatatgtgtagtgtgaccatgtaagcccaaattgtgcactgggtatccataatagaaatgcaatgcaaataaccatcggcctttttatcaactggcattatttttccagcaacaacagatccctttgctttcacaccactccctcacagacgcagtgccaacctcgcgatcctcacccacaagtccaagtccctcgatgttgagccatgctgtaaaatcttccagaacaatagggtcgtacatgagtatcttctcatgccacgtcggtcgattacggctaccacgagatgatgatagcggcgagagccgaggttgaacgcgaacagcttgggtgatctgtgcagatatttctaccaagctgatttctgttgagtctgctgtgtaggtggttgcgatgggtgcagaggatgatggtcttttgactatattggaggaaacgaccttgcgcttggtcgggctcggtggtggtgtttttgtgaagatatccaaggagtggtgttgtacccggctgtcggccttggactttgaatagatatcggtgtagtgcttttgtacttgacttggagagggagtgatttcttcttctgagtcttgaatctcttctacatcaataaatgacgtagaagtcccagtgataggcttccctctcgggtttttctttgggcttgtctgggaataggtttgtaaggcgggtgttgattttatcgcgtcaagtgattttcggttctttataaatgttccagatttagacttcaccgtccccttcgaggtgggtttcggaacactgtccattttagaggcaggttcttgttgttgttcgggttggtaaataggctggctgccaggggtagcattgctaccatgtttcgattcccaacattgttgaaggagatcgatcatcttcttgcggcctctgactgccttgaagccataattagagatctgtttagacaactctgcatccgtgaacccggtatattgtggcatcgagggcgcctgcgagctagttggctgggaaccgacgacttcagtcggagtatcattggctctacttgcaggttttgtagcattcgccttggccttcgccgtagtcgtagccatagctgtagctgtagctgccaggatcggagcctgagcttgaacttgtgtgtcagaatccaagccccttttggtcaagggtggtgatgatggtctcttttctgggggtgaatctatgtctgcaaattcaagctcgaaccagttcctttgaagaggtttgtggcttgcttgttccacaccctcctttgcaggaggttcatccgtcaggtcaaccacgtttagtgtttctggttgaatcaaagatccttcggtgtctctggcgccaacacaccatagattcctggtgcctgccaaccttgatacaaaacgagtagacgactcttggatcacgctggggtccttattgcgcgtcccttctagatatgaaagactttcggatgcatggatggcttgctgagtctcccgcagagtctgcggcgaatcatctctttgcaattgactgcaggtgccaaatacaagatcttgatcattcagaagttcaacggctgcttccggggaaagtaccgtgaacaaagactgtttctctgtctctttggcctttcttcgtctaccttttgtcgttctgatgtccggaaggcaatcgatcaccggctcatcctcttctacatcatttgttgaatattgcgcagtcatgcgcgcagtcaacgtggtgaacttcttaggtttgcccttggttgtctttttgggcttttccaagttctctctttgagcagacgcctgatcagttgaatcagagtaccttccatcgagtgataattggatttcaggattgaccaactctatccgccgacgtttcgttggtcctctgccattgtcgttctgcaaaaggtcgcgggggttcaaagctaacccagagtaattataatcggataccaacttgccaaatacacctgtaaggttcgtaccatgatccttatctgggatttcaccatcgttcacggtgacagtttcctcgtaagcggtctcccttggtggtgtccagtccatccttcttctcattgcctcgtctagatgtaacacctcattctttcctaaaccatttgattccttgggagtagatttgtcgggtacatcttccgaaggagatgactttgtggcaaccgtcttcttcccacctttgctcgatttctttgctggttgatcgccgcttgtctttgtaactttcccagccagagtcatgtttcccgcatctttactcttggcattctttcgaggacgactttttgttggtttcattgtgtcattctttgtgccaacagtctctggctcggggtccccaagcgcaattgttcctggtgcatccgcggttttctgcgccttccgccgcggtttgttcaccgcggttttattgctggtgtctgaagtaggatccttctttgaaaatcgctttttcggcttcgtgacgtccttacaacaagtattgttcgcgattggagtgggaaaaaaccgggaacgcgtatgaggttggaacaaatcggatgtcgagcgtattggtggtggcgttgtacctcgtggcaagacacaaggtgccggcgttgcatcatgcctacctggccttggtgaccgtggtggatttggagaggacgacagaatgatcacgtctgcaatactggccatcgtggcaagtcgcgtctctggtgtttgcttgattgatcagggcgagtcgcgtgcactgcttgggtttgctatatcaggacatatcttaggcaacatttatacctagggaaacagtataaagtgtctgcgagttgggtatgcaggagaagtagcgttcggagatccgagttcaatatttcgatccacaagggtcgatcgcccgcggtcttggcaaagctctatgtacatgctcagtagtttggcccggcaaccaactgcattcaccccagcagagtaaatccagtttagacatatttacgctgaatgcttataggttcaattaattcttgatttgaagacgcctttttactgtcctgtatcacatgaaacaaacgaccagtgtcgaactgccttgcatctcgggaatatatcattcaattcatcattatcttgacttcgtgcaaatccggagtgttctcagctcaatcctggggctgaataatagtagacctctaaaaaccccataggatctgcttgtgattgacgacaggcatattctcaagtcggagccaatttggagctcaatgtatcccaccccgaagaaaaacagcacgacttggagaatgtatgcatttcccactcgtcccacggcaggtttcaggaatttcgagcacagtgaatttggttctttggtatgggcaattgctcacgatcccctcagggcgattgaactcaacaaggaattttcaagtcgttgcttagcctcatcgtttttcttggccgttggcgaaggcagagcccctagcttgtatgctttcttgatcttgttgatatcagacatctcggagagtgtctggtcatcgaaaagcacaggtgttccttgaaccgagctgtccaagtgggccgcaacggattcgtgtgttatctccggagagacagagaccttgaccaccaacatatctttggttgaatcggtgataccaaatctacggaatgattcggagatctaagcccgtgttagctccggctttagtggcaaaatcgtcgctaactcctaaaattggcaacccacattattcgtagggttcaatgagaatacgatctcagaatgcacattgtgagatttcagtcgattgtgcatgtaatcattaactgctctgaatactgcagcaatgacttgagcccttgacagaacctattgttaatgtcagttgcctagttccctttcatggtccttggtgacaactcaacataccatgcttgcatcgataaatgcatactcgaattctgcctgaccgtcgagaagttgacctttcagaaaggcggcattttgaacatcgcgatagagagcaacatgcacgggcatcaatggtagatgtgccacgctgatcgtctctagacttgaggccatgactaaaatcgaactgaaaccgaaattagaaagttgatgacgtatgtgtaatcaagctgatctgattaaacaatcaagtgagccctggagttcactgtctatcccacttcttgatccacgtgactaattctggaattttccggacttaagcggtcgccgacggaacatgagtaatcgcctccatatcatccgcgggcccgacatttagagacctcttcaatcctagctcttgacactccccattgcgaaaatggctttcttcctacggcgcccgttcgctgtatcctcggcacttcgccaggtccctaagctcacaaacaccgcccgattcattcacaattctcccatcaagccaacccaagcagcaaagcctcagggcgtttcctcgatcttcgcccagtctcgccagaacttccaaaatgccttccgtcgtacatacatgcagcagagtgtcaaccctgctcaggatggtaacttgacccagaaactggtatatggcgctgccattattggtggtacaattttggcaaccaacttcatcttcaaccgcgaaacgagagaggatggcggtatgcccgcttacgagcggagcttcctgaatgagacttttgtgcacactggtcttggtatcggtataattggtgttgctgctcgcgccctccacatgagtggctggtcttatcgtcttatggctatgaacccgtggctcgtcatgggcgtgggtctcgttggcagcatcggatccatgtacggcactttctacacttccccggataagtaagtttttcaccttctcttctttgttttcaggagaataatagctaacttttcaattaagctacgttctgaagtatggctgctggactctcttcaacgttacccaggccgctcttctctcccccttgatgttcatgaatcctgccattctcgctcgcgctggtctttacactgttggcatgatgggctcaatcgcttttgtcggtgccactgccaagcaggagaagtacctttacctgggtggtccccttcttgctggtgtggccatcgttgctctctctggtctcgcccccatggtcctccctgctactgccgctcgcactctgatgtggtctgagcgcgtttggctgtacggtggtcttgctgtcttcggtggtttcactctttacgacgtgcagaagattctgcaccatgctcgtcttgccgagcgcggcttgattaagcgtgatgtggtcaatgagtcagtcagcctcgagttggacttcatcaacatctttatccgcatggtccagatcctcggcatgggcaacaaccaccgtcgttaagctccttcatatccactatattaagtgtgcaacctgatatcgggtttgtaacatcagaatcgttgtttcgccttcttttttctcgttcattttacaaccgtgtatttgatgaaccaactgttcatatttttttttttattttttttttggtcttaaactttgatgcttcttcagatgggcaagaccagtcaatcactgtttttacttaccgagaaacatagcagatagggtatgtagtgaatataatctccactcccttgacatttctgctgcatccggaagcatagtgataaccattggagtccgaaaaactccgacttggaagtcgacaaaagcaaagaaatataacacataactagtaatcactactggatagttccaaggttgacatagatatggctaatgctacaatatagttgaatacggtagatttttggtagtgatttaacatgactgccttcgcaacaagaatatactggttacctagcatctcgttgtttgcttaaggtccagatatcatctagatacatgcacatattgcacaatgcaatggactcgaacttatcagaggggcagattgtggtcatgtgattgcaagcttctcttgacggaggttgcccaataagaccgccctccgccctctgcagacttcagatcgcgatacagactcattgaccactacaaacgtgcagattaaacctcccaacataatatcaacacagtcgcactagccttcttgcttccctacctcacaatatgtcgagcgagatggaaattgacactcctgtcgcaaacgacgacgctcccgagcaatcggaccgcagttttgaaccacgcacccaggggaacgcggtcgccgtgcgcagtatcgaaggatggattatcattgtgtctaatatccacgaagaatcgtcggaggaggatgttaccgaactctttgcagagtatggtgaaatcaagaacttcagcctgaaccttgatcggcgaacgggttatgtcaaggtgcgcatcctgaatttcacaactacctctgaaacgacccccaacaacgttccttctgaaacaaggggacccttcttgactcgcgtccaatgaaaggatcactaacaccactattttggtagggctacgcattgatcgaatactccacgctccccgaagccagtgaagctatccagaaccttaacggttacaagctcctcgaacagacgcttcgtgtcgactatgcttttgtccgcccgcccccatcaggcaagaacaagaatggagggccaaaaggccgtgctattcggaatcgcagcagaagccccaaccggagtcgcagccccgaagctggcggcgaccgggaataagccttcctgatggatgggaacgataaaaattgacctgcatacattgcttgtgatcttctattgatacctgggctttgttttttctcgcatttttctctatacctcgcgctgtttcgttcgaacctttgcccacccttcctaccagaattgtctacaaatgatggacatatcatctagtattcgccggcatggccactcctcagtcgaacctgtatgggtccgcaggtcgagtgtgggtgtgcatgggacacatacacacaattggtacgtgccggcgccacgatagattgccataatggtatggaaacccgtccttaacctttaacttcaatcatgctgacttctactcagaaatgaaaggccgtttgatgaaaattgaaaattgatgtatgagcatctggtcaacaaagacaaccttggacctcgaagacctgcctctgggagtaatgtacattatgaagaatggttcttcttaattataagcgaccttcatcatacgcacttgtcttgtgacctatttgaagacaaaatcaaaaatgttagtagagtattagtatacgatgtattagcaggatcccttatggggtggaatgcatcatgcgatagccatgtggcgcaagagtagaatcgataaattattttggattctcgagtgagttagtacatatcgtagagtcagatggtttgaatgcttttaaggctttgatgccatacaatggatgtggatgttcacctgccccggtgcccgggtgggcagcgggtcttgtgactaagcctaacccttcccggcttccccgcatggcgcatgaggttatctctgtccctcttttttagtcgatctcattgtgccctctctactccctattcttatagacggactccagcatcctgtgtctgggagtcctactctgacaggatatatttcctagggcagaatggctccccaatacatatcttttacccccttggggctatcacgacctctatactgtattcttatgctatgcttcctatcgttttcagctgcggccaatgcgctggcgtatccatctcaggaacttttgggagtgccttcagtttccagtcccgttgatgatttcccaaaagtctttagggatactgaatcggcgcgggaagcgtcggttcgcgaccccattctgaataccttacaggatcttatcgccgccctgcaggtgatgcaagacaagtattttgtgctctggcagggcacgtggcccaccagtatcgattggaccgcggcggtactgggtgcacacgtttcggcagcgctctcgactctaacctcaggcccgctcgatatccccgacacggatgaattgcaaggattatccttcttcaggctcgagcacacggtcaaccgattcttcagccatactgccgcgttctactttggcgagaactctttcagtcttagaaaccaggcctacgatgacatgctatgggtcgtgctagggtggttggaaaatatcaagttgcaaaatcttcactcggaccttcactatgtctcctccaacgacagttctggagaactgtggtacggtactcagttccagaactctgctgcacacagagcacgcgtcttttacgagctcgcctctgctggttgggacaagaccctctgcgagggcggcatgatctggagcccatatttgacgccatacaagaatgcgattacaaacgagctctatatagccgcaagcatcgagatgtatttgtacttccccggtgattccattgacgcccctttccttgtcgactcgggcacgcagcgcgcacggaagaacccatacaactctcttcatctgcaggctgcggttgacggatatgagtggctcaagaagtcaaatatgactgggatcggcggcctctatggagatggtttccacatccgtggctggcaaagcgcatcaaatcccggctcgggacaatgcgatgagcttaactctatggtctacacctacaatcaaggagtcattctcagcgggctgagaggactttggctagccacaaactcgcaagtttatctgcgtgacggtcacgagcttgttcgcaaagtactgcaggctaccgggtggccacatacctctagccagcagtggaaggggcttggtcgcggaggtgtgctcgaggacgcatgtgattctcatggaacctgctcccaggatggacagaccttcaaaggcatatttttccactaccttgcaggattctgtcgacctcttcagccgcaagagaagcagttcctggcggacaggacccgcagaaatgcagcagatgacgactgggccgaagtctatgagcagcatgtaaagcagtgccgcacctatggttcttggattaaacacaatgcgcaggctgctctggtgactcgtgacaaagccggcaagtttggtacctggtggggccgctcgtatcatcagctggatgccaacgagatcgtggatagcagcactatcccgaatggtgctgtagattaccgcaatgccgatcatgaatcaactacaggcttcacaccgaaggactacaacgatcgtggccgaggccgcacagtggaaacacagtccggcggcgtcgctgtgttgagagccctgtaccagtggcaatcctatgacgtcctatgaacaaaacaaatgaacggtttgggtttggggttggtgttttggcggtaaataggcaccattcattgcatccagggctttgaagctctttttttgtacatcctgcacagctacagttactggggatcattatcatatcgtccaggttcgacattggcttctcagtagttacgattttttcaaactggaactgctttcgcatcttgacaacttcccctgacccttggacctgccgatcaaagcagtagtactacaacgctagtcttttaatccgatcctctatggatctcgcatcgtgcacttatcaatttagcaacacaacgattggtggcaatggatccccagcttccccattccgatgatcctctccgcagagcacggcacataaaacaggaattcaaaaaccaaaaccggattacatagttgatcgtcggatctgcaacaagtggacactggtgtgagggattacctatgttgggttttgcgagagacataggacattttgcggccgacttacaatataagacatgtttctggcgatagctacacaacgttgaggactccagtttgggtctgcttatgcgatacatgttgagcaactgacaataatatctctgtgttcccggagtgaaacctatgcaatgaatgagagatctttcatgttgtcttgccgcggatatgatgttcgatattgacccccagagacgatgtgagacacagttcggcacatttctaggtaagttgatttcctcggctattatatggagatcaaactctattatactatctacttcgggccgttggagagagaacaggtggatgacattggatgacatgttggatgttgaatgcatagaatgaccggagggggcctctacactgtagataaggtgtattccttcggattgtcatccttcagaccaagccttatgaacagaagtatgaaagcgacataccttgtcaccactaaaatgccaaaaccttgaattctcgtcgcgatgattgggccttcaataatacccagcatcgaagaaaggcgggaaggtggccacttagaacacagagaggggcaaaaagaagcaaaaagaagggaagaaaaacccaaacatccactctagcgtgcggactaaacatccttgacgccccctccgtaatgagggacaaaaaaacgcgtccgtatagggtgggggtttcgggagtccgtagggcacgaatcaacgcgacgaaacatacctgcagatcggcggggactttgtttgaccattattcggagtagctctctttgggacgccaaaaataaataaaaaagcaatttcagggttcgcatgatattacgcggatgtctcatgaacaacgggtggaatggtaatagctgtagaaatgtggtctgatatcgattttgtctcagtttgccccgatggccacgtttttctttcttgcttagcgggaaccatagttcaattaatctactgtagaaatgatataccctaaatactttatgttgcaaaccttggaattaccctaataccaatcttaaacatggttcttatcgacttgttagattacggcccaaagcatgtcacacgcacccccccacctcatggggttcggcgaagagggtgtacaagtacggagtacggagcactccgtacacctttggcagttacacctgtgctcatggggaaggtactagatacggtaggtctgagcgtatagttcagcgctgttcctctgaggtcatctgacaacgggacctaggaacgcattttggtttgacagagggggtgagttggctgtcataacctcataagcaagcccagcggggcaagaatagattagttatgtaggatgtaggatgtagaatgtatactcgaatattgatatattatatttctttggatcaatcgcattctgagtttatagtctgacggctctaactcggcaggcacgatgaaacccgatgttgacaaaggcggaaagactagtacatatccccggaccttgaaggtggcaccggcaatttggatgagggtctaccatatcttgccgaaaccggggagcatagcagagagagtcattgaaaacgatttgctgagatcggcatctatgatggcactcggtttcacctcctttttggctcggtgtcgaataataaggaagcatgtcaaatccagtgtcgaaggtcataatgaatgatcgtctggattccaagcgttgggcgcacattggttgcgatggagtgggttaaggacgggaggtggtgactggtcgcgggatattacgacaggccctgcggagcaagaaaatgcagttgtgccactgaactttcctggctaagttagtcagttaatcttccgcattattctccagtgctgtggtcagtttttctctctcggtttttttttttttttgtggcggtggaggcggctaacgaggggcgaacggggatttatcgtcggatatgttttttgtgccttccattacagtgcaacatacgttctatattggcagatggacaatatgaaccaaagaaggaccttcgggatctgtacggggggttactggcactctcctttgtccctcggccgatcttggccaagggcgggtatctaccccttggaatcttcgtcaccgtatgttgtacgttgtagaatcatgaccagtatacaacatatccaacctccaacctcgccgaggtaggtagtagaattggtgtactttggtatcaccacgatgtatacggagtaagtatccgcgatcagaaatacgttcctaaggggccaatgatatccatggcgtcatttggctctgaggctcgatcgacattgcatgcccccccccctctgaaggacaggggtatggccacatgtgcaatactgcataatacgtgattaatacgcgattcataccgatataagatcggttttcttttctttttttcttttctgctttattattccccatacccgtagacggcatatccgggtgagaataatgcaggaagacccaagttcccggagagtgactataaaatataaaagaatgcagactccgtggatcgatatacaatatacacagttaatctttttttttttccacaatacgtgtcaaatcaatgctacagtggagaggaaagcgtgtgccctatgatgtaccgagtacctgatcggaccatgcctcgaatagggaacggcggtgtaccgggtacttgtcgggaaggtggtgtgtggaaaggggaatctgaggagccacccgttagttcctgaacgcctctcgtttctagaaatcccctctttttttcctttttctgaatcttcaccggttgattttgattttattgggtttatttgattgatcgaggggggcatttcgatgtctatgggctggctgggttattttaatattgtgccacgcgatgtcgacgggaattgcccttatagtatgggtattaattcatctataaaaaaaaaaagggaataataccgacatctagaagaaaataagaaaccagagggagcatccaagggacatgggttcctgttaagataggcaattataccggaagactccataggtaccccttggtaccgcacccgtcgtaccacaacgtaggtcactctgaggtacccctccgctgtaacgccgataccgaaactctcttccttttcccccaaagctcttttcggttctctgactcctctctctctttcttcaaactatcttctgtctcttctcttggaaagtcctcctcttgccatatctatagccccgatccctcccttgtggccaacctctcttcccggaacgagcgtggaaaaaaaatattccctggaccttccctttgaaacttacaccactccggtttacctttctctcccctctttcccaatctcgaattggattcagcacacacgcatttcggaattactcgtctagtcaagagtcggccacggtcgtcttgcgaattgcacactcctccatctcctttcgacttcccaccgacccggtagctacctcaagcgtaacacagatttcttgtctggggtacatcgctaggggtagaccgtggtcgttcatcagccgttactttccctccggtctttttttttcagtgtgcatccccaatcgtgggagcctgatcagaccgccatcctggacctcatttcgatattgtgtgtcgcgaagcagtaacctttatggcatcagataccgaaatgacagaagcctttcccgttgatactctgccgcatcccaacgacggtggccacatgcatatgtcgtcaatgtcatcatcgtcttcgatatccgacgcagaacacgagcgccgaggccgatcagaacgtccgcgaatggcgagccgcaaacccagtgcttcaatccttgtcccgagggaccaccccgaaattgaaatcgaggaggaagagtttcctcccgacgatgcccgcgcaatgagtccacgacgcaattctgccgacctagagcgtttaggcaaggaggcccgacagaccctacaagagtgagttgaaaaaacacatccaaggcgtttttgctactgaattacatcagatccaagattccggcagctaaccagatgaactcggaaaaatacagacaggccaaggctctccaatcgtcccttcaagctctcgccgaacgcatcgacgcggtcaaatcggaccatgacaagttggaaaacgagaacaaaatcttacaagactacattgggggtctcactcgcaacatgaccaagagcgaaatgacccgcagtacgaaagcacgcaaagcacaaaaataaaccgcctttccgagatggcgcaaggtagcccggatacaacatcccgtggacgtcaatcgggaggaatcgcctgtgactctgcagcagggggttccatgcattacaaacggtcgcgggttttaccgggattcgaattattttcacttcattacgacgaaatccatggtcaacggatttctcttctcaccgcacatccaactggtcgcttaatgagttacatgcctaatatccgcatggcaggtctcataaaacagcagggttagggaatgtctgtttacaaccgtttctccttccgcaatggggtgcgtttacccgggggcaatctctcggttaccattttctcacacatcatatctgccacccgactggttcgagtggccaccctgaaaactcaccacctttcagtttaaacgccaccaagtcaccatctccacatttcccctgtccaaccggggtcagctgctaaaccgggggtgaggctgaatcccgaattcttttactcaagggacttcaagggattgcttgtgacatcattgcatgctcacctgacttcttggcacttgctttcccgagttcttcattacatcatcctcaaagtcggtgtgcaaccttccatcctatcatcttcacgcagtgttccaccctgcctctattcaaccctgtcgatattattggccctttttatttcctattccgcactcttcattcggcgttttcttcttatctttatggcggctcagtgaacacgtttcacttgtactttttcttcctttttgttgtctatgcatagcaccttgggcgtttcggggactgggactagactcgatttgattgaatggctcctgctggagcattgaactgtttcttcgtcatgggcattgcatggtggcggtcatcgccacaacagaacggcgtgggaagtggaaagcatctttaggggtctttggggcagtccatttatcttctcgcatgccttctcgatattcgaggggctctctgtacatctgcatctcaacctgtttttcttttttttctcttctttactgtctctgctggactgactcgtgtctctgcatgcggagacaaagatgccgctgtttctcattgttatcattgtggctctatttctacttcttacacttgacatacccaggagcgtgcatgtctcaagtcctctatttccctttattgccctcatacccctttttatcgagcccacatggctggtagcattgtggtttcgaccatactaattgaaaacatttcaattaagactgtcttttgtagatctctatagatccaataaaaccccaaatgtggcttgctacactatgacacaggtaacccgatgcggccaagagcgacactcggcgaaacgccatccaatcgactaacgggtcattacgagcggacaaataaccggaccgtatgtcctgcataccccgtgaagaaattacgccgatcaatccgcgatgtgacaccggcaggcgcacataagctcggtagtgtccaattaatacagccactgatatcattgccgccctcgtctgcagtatacgggcatatatgcgcatatccgcgcatcctagtcggatatacagtaggaatacggtgtaccgattcattatttgaaacaatgctttgtattagttaaggatctggtacgtaactaattagttatatattttggatgacctatccaactggttctatagggtgttctgattagaggccgtgctgcctatgggtagtaacgaagatactgtgaataatggagtgtcaatttagaggcaggatgaggctgttatgataaattcttccatctgcaccgcctagtttactcggacaagacagcttgttggctactctgcgacatccggggcaatggacatagactcatacacatacacagtcatccatgcttcagctacaatgattcgcaaggtagttactggaacagtgtacggagattatcttcgaaaccacatctagtgagaatcaaaacgccaaaatggcacatatacggggagtgatcaataggaaaggtgaaaagccaggttagggatcagcagggatacccttgttgaagtcctgataaggaactgatttggaaaacttctgtgtgtatgtgtgttgggctgggggagtgcgcgcaaggggactctttgggtagttaagaggcaaagtaggcaaaataacaaggagaatgaaaaaaacgaaaagaggagacaggatggatatcccccagggcagagaacaagcgccgggccaaagcaaaggcaagtaggcaagcagacaagcagagaagcttcaaggaaaaaatgacccagagagcagggtcacccaaagatcgcaatattctcacaccaacccttgcgagtccctgcgacaataaaccgacaatcggggcaacacatctcatcatccttcctccttcatctcgaatctatctccttgtactagaagacccgtcgcgcgctctctttctctcggttgttccatccgtcctgaggacgcgtgcccatcaacaaggtctttttaggtgttaatcatttactcggcggcgggcttctcggcctcagcggccggggcctcctccttcttctcagcaggggcagcgctctcggaaacgggctcagcctcggacgaggtccagagagtctggtgagaaacgtgggtcagtgtatgaacaaatttgaatcagtgtgtgatttgaacacttacgaggttgtcacggagaagctgcatgatgagagtagagtccttgtagctctcctcgctcagggtgtcgagctctgcagacaaacattagctttggtcaatgcacgtgacggaatttgaacataccagcaatggcatcatcaaatgcaagcttggcgaggtggcaagcctggtcgggggagttcaggatttcgtagtagaagacagagaagttgagagcaagtccgagacggatggggtgggtaggagcaaggtcagtcgaggcgatctcggtggcagccttgtaggcctccagagagtgatcagcagcacccttgcggcggtcgccaatggcgaactcggcaaggtagcggtggtagtcacccttcatcttgtggtagaagaccttggactcgccgctctgggcggacttgatgaggtggtcgtccagaacctcgaggatatcgtcgcagatcttggcaagctcggcctcgatcttttgacggtactccttgatgagagtgacctgggactcgttgcccttagactcctccttctgctcaatagaggtgacgattctccacgaggcacggcgggcaccaatgacgttcttataggcaacagacaggagattgcgctcctcaacggtgagctcaacgtcggccgaggcgacgactttcatgttctcgaccatctctgcgtcgcattgtcaggagtctgtgcaactgaacgatctagatttaagagaaaccaaccttcatagcgctcggcctgctcagcgagcttggcgaggtaaacagcgtcttcgtgacccatggtgaatgtgtgttttctacagtccgaactatgttagccaatctttttcttctcacatgagtctttattcttggattgatgatgttcgatgcgagggctgaaaatcacgccatgggacagtgcaagtggcgatggcgaggggtagatatcgaccctcgaccccccttcgaatatacggggaagggcccagttgaattttgatgagtatcacatagaacgtctctggatcaagatattggaacgaaaaactaaaagaccccagagatttggccgatcatgacgatcgtggcggttacagggcccttcttcccgtgtgtcgttggggagtatcgcaggaaagcggtcgcggcaacgggtcaactcgtgaacagggagacgagaacatgtggtttccaccgtagattgtagcgcgattccatgatttgaatttgggcagaattgtagttttcagattggtctcttcccatcatggattgttgatgtgtgggttttgcggtgatgacggggggtgggcatagaaatagggcgagaaaaggacagattcaactgggggaacgacaggaagacactgacctggtttgtgaaagaggaaatgaaggcgattaagggatagcaagatggaagatggaagagagtagggagttgaaagagaggaggtaggaggaaaggaggggggcagaaggcggtgttgttgggatttacctgaacaacccacttctgttcgggctttgtggttttttttcttaggaaatatcgaaaatgacaagtcgaggtcacttggacctgttctttttcttctaattattttattttctatatatatacaaaaaaatccaggaagatatggcttttttgccaatctatacacagcacaccttctctcatcgcttctgtgtggttcggtgggccgcctacagcgtcatccctcattcggcatccgccaatcgcccggttccttacttgcgcctcattcgagatcataaaccaaggcagacagcatgtgtcggaagcagtctagaacgaatggatatacagcataaaggcttggctattggcctaccgggatcgcaaaagaacgcaaaagaaggggggaaaagagtcagctgcagtagattaatgatgtgatcatccctgcaacccctgtgatccgaagtagttgaagtacaatcgtatacaactcgcaagggcccaagtggaaaatcgaatgagaaggccgcgacttatcagaaatttttgttcacatgaccttcacctgacataagcttgtttcttccgaatccccatcacatgatttggcttggcacgggacgttaccttcctcgtacccgagctcacctcgtaaatcctacctgaaccacttctaccatctaaatcatcaacatgcttcgtcaatttgttcgtcccgctgctactgccaaccgggcagttttcgcccgctccttctcggtagccgtccctcgcatgggcgaaggtgacaccggtgctccccgcactagcggtggtacctcctccgggtaagtgcgatgcacgttgactgcggattttacgctcgaagtacaattgtaccgagtagacagcccatgtctgccttgccgcagctgggtgacatatctgtatgatcgctaacgttgggtcctactagtgactcgttcaccaagcgcgaggctgcccaggagagcctttacatccgtgagaaggagcttgagaagtaagttccgcgcaaagccgagaacaatcagacaatcagactcgagcggggagctaatctattttgacaggcttgctcagctcaagaagaagatcggcgagcagcgcaagcacttggatgagctcgagagccacatgtaagtccaagtctggaaatactctcctgcctatttccttttcagttgaaagtaaacggcaaggctaactagtttctctttagcgatggcttgagccgctaaatccatacacccattcatctcatgtttaatatgaagggcccttccattgctgtgtataataccatcttcgctccaacgagctatcgtgcttgcctgctgcattgaggtcgtatcgttttcagcgcctgttcctaaacaggacatctctctaccatagcatatggaatttctgcgctctggtgtatagctcagtagctcactcggaaatattattgagaaacctcggtaaaataaaccatgtttcaatctgtacggagagtagtcttaataaactacctatgtactccatatgttcttggtctttgtacaagtacacgagattcctcatcttttcgcaatgtttatgctttcttttggcctcaactaacccgagaacattgtcttgcagcaaatgtttacccaaccaggtttaccagcattgtacaaggattatacgagttatatgactaagttgtatcttgccagccgtctccacaaaacaaagcatgatcacccagcttaggctgaggctccttccatcttacctcgacccaacgcccaaccccccagaaataccccgccatgtctctcctcagtttgccaaacgaaattttgctagccatagcagagaaccaagactgcgaaaaagacataaatgcgtttgcaagaaccagtggccgttgctatatcctcctgaaccccttcctctatgcctacaacgtccgagagcaccagggaagcgccctccattgggcagcaacccaaggaattgtgagggcggcccaagaatcactccagcaaggagcagaaattgaatcgagggactgggaaacacaaaacccgccgttgatactggccgcttactacggccatgctgatatggttaccttcctgttggcacagggcgctgacccgtacgccgaaagcggcgggaggacccaagacgcgatcacatcagctgtgctccgcaataaaacagccgtcgctgaaatcttgcttgatagcgggattgatgcaaataggacggactacaggggaagcagcctattgcatcttgcggctgaatcatctcccctcagcctcaaggcagtggtgagaattcttattgagagaggtgccaatctggaatctaggaatgaactgagtcagactccgttacaggtagcgtgtaagtctggttccgtggaagtggcccgatgtctcatagagagcggtgccaatttgaatgtgcggagtgaaagtggaagttcgctcctgcacctggcgttcagtgaagtcaagaccgttgagttgttggtgcagaaaggagctgatatcgaggcgaaagatgagcaaggtgagacaccactgcatctggcatgtcgggatggctgggtcgaaacagcatcattcttgctggaccatggtgcagatatagagtcaagatcgctagatgggagcacaccattgatgcggggagtactctgggagagtattatatgcagggagctgggcccaacctctgtgaccaccctcttgctgtcacgaggtgccaatccaaggcagggaaatgatttcgatatcacaccattgcattgtgcgacggccaaagcaaattctgcgcttttcaggctattgctacgatatggtgccgatgtagagccaaaaactagggctggcgtgacgccgctacacaaattagcgtccactggctcactggactccgcaaggcaattgttgcagagaggcgctgatgcacaaccgagggacgaagaaggcaatacaccattgcacatggcagcggagagaaatgatgtggaattcatcagtttgctgctagcggcaggcgctgaccggctggtcagaaacaacaagggtcaatttcctatacatgtagtatcaaaagcagcacacaaatcagaagaaagacagagagaagtgatggctctcctcgaggtttggtctgataattagcattagccatagtgaccaaagacataatatacaacaaatatctgagaagagtttgtcaatcctattgcattagattctacaaaggttcgaaatttgttaatcacaaagcacatgcaagcattttattgtgacggactattagcattcccagactacaacagaaagcacatcgaggtgccacgtagccaataactccgagttcaaatcattaaaaaaagccatccagccctttaccgtccttgcatgaaggagcggtagaaatcatcagcagtgttgttgttgcccatgccattgttgggataaccgtatccgagacgggcagagattgattggcctgccttttgggcggcggtgaccttggactgcagatccgaggtgccttggtcgatgagctgcagctgggacaggtgcgcgttgagaatacggacaatctgcgaaatctatagagatgcgtaagcaaaagaataaccctaaagaagggatcaatactggtttgtgacttaccggctcatctgcgttgttggtcttggtcaatgtggatgaagcaccgttgacctcttcaatcatgctggtaagatccttgcccatttcgtccaagcgttccgagagcttttcggccagtttgtagctaatggctagattagcaaaccatatcaaatgttgcgttgtgtgttgtacttacgttgtctcacgctcctggtcaggtccttgaagggactctccagggcccacctgcttggtaaccatctcgtcgacttcacgctcatatcgatctagccatgagctgagctcatcctgttgaccttcaaccgctgacaattggcgctcaacctcctgggtagctcgatccgcatcaacagtgctgccgtacagcttctgaaccttggtaccattgtccaccagcagacggtcccactcggaaaccttctccgcctgttcgcggaagtccttttgatatttgccgagatccgtggcccatcgggtgatgatctcatccatagttttgttcttcaggcgtgactgggctggaggagcggggccggcagtagactggccaagggcggcgggcccagctgcagcagctggagcagcggatgtagtcgaagcagccgtcgtttggggtgctgaactggcggaggtcgctggttgcgccgaggtggtagtagcagcttgactgaacaagccgcccgtaggtgcagcaggtgtagtagtggcaggcgcggtagtggccgcagtacctgaagtagttgtgggagctgaggtgttgaacaggcctccaagaggagctgttgctggagtagtcgacggagcagccgtggatgtagcacttccggcggaagggaaaaaaggcttttgaggggtagcactcgaggtagtgggtgctcctagggagagagttgtgtttgcggtggaggcaggaggagtgcctgccaggttcttgaacatagacggtgtctgtgagctttgcgcaccacccgcgggtgcagctgcgccgaagagcttaggagtgctatctgcagtactcgtgggagtggctgaatcggccggcttgcttccactgaatagaccactgctgggcgcagtagcggttgcgccaccaaaaatcggcttggttgctccccctccaaacatattgttagatgcctgtgaagtagcaggcgtggtagatgacggcgctagggtgggggtagtcgagactccgaataagctactgggtgggttagatgccggcggaggaccagcaggggtggtggagttgttgccaaacaaattgcctcccgcgggagcgggggtagctgttgtagcggcgttgccaaacatattctttgcacctgctccaccaaacatcgtactaccggcaggtgcggccgattctgtagacttgttgggagtctggttgccagcagtggcgccaaagaggttaggctgcgtgccagttcccgatggagccttgctgccgaagttgaaggccgaggtaccgcccttggtcgcattggcagcgcctgcgtttccgaaggttggtgtgctttggccacttgcggaatttcctccaaacatcgatgtgctgttgccggtggatgaagctccaacattaccgaagagcccaccaccagacgcattgttatccttgttggcaccgaaggcattgcctgctgtgccgaaaagagatccactagaggcgccagtagaggccggggagtcgaaagagaacaccatggtgctggtgaccgagcttcaggattgggagggaaaaagctggatggagagaaagcaccagcgacacggagcaggaaaggtgggcctgcagaatggatcaaaagacccaacagtaggagaatggagctcttgatcgaatgaagtgagacaaagagcccaagggtggaatgagaaaagaaagtcgaagacaatagacaatagacaataataattggaaggagtttggcaagcacgcgctgaaaacttggcgccttgaatacaaggcagtaattatgcctgaataaagtggctaacatattgataattagtgcctaaggcatacatgttctggactcacatcgatcgcagggaaacaagtcctcactgcgcactacacacgaccccattgcattttgaattattcatttatacgtgccccttctttcatgttaacaccctgaattcaagctgcaatcatgtcggaggggccgtccgatttgtctagttcgcatctagagccacccagcagaactacggaaatgcaagatccaggagctggcgaccacagtacttaacccttccatatacttgaatatttgtttgaaactgacatttgttatagtaacttctgaaagtgaagatgaacacttctcagatgccagcgaaggcaatcccgaactcctcccacaatctggtcgcaattcccctatcccacgaacgcgagtcgagagggttgacagcagcacccaacatggagagattcctggcacagcagcattcgaaaagagagagcaggatgcagttcctgatgaggttgaggttatcccagaaggctcggacagccagatgccttcgcctgcagacgaccaaagcttgagcccagaaggcttaccgtttccacgcacagtggttgagaaggtggacccagatgaacctagccatggcgaagtccccggaacattggcccatgaacaacgtcttgccgatgctgtgcccgacgtggtgaccaaggcttcagattccgagagcagcccaacgccaccagcatccgaccctacacttcctgagaccgatggatcttcaatagaaattcccgagacacggctcgagcgggtggacacagctcccgctgacgaagacctgccgccacacccacaagctcataaaagctcagcaagtgacgcattacccgatacggtagaaaccgtcccggatgtctcaatacatgatacagacctggaaaccaaagacccctcattagaggatgacatgaacgatgaccacggatatgaaaagcaagaagcgggtgatgattttgatgaatttgtagaagagcaggaagacatgggagatgatgattttggggattttgatgacggcttccaggagcccagtgcagaggaagcccccatagacgataccgcggcatctcagcaatctcgagcacccccacctcttattgacttcgacacatacacatccacctccgcactcctcgattccctcaaagacaccctcgacattctcttccccgaaacccaagacataagctctctcccccctgtcgagccaatccccgactccgcagcaatcttcagcaccgagcgatccctctcactgtggtcccagctcgtggcaccaccacccctccagcctcagaactgggtaaaatcccgcattcgccgactattcctcgtatccttgggcgtgcccgttgatctggatgagattctcccagcctccaaacagaaaaagctcgttcttccttctattgaccttgaaggcaccggcgcaaagagccccggcgctcgttccgctagtcaagtccgcaaagaagaaggtaacgacaacaccggcgaaaaggggcaagccccctcccgccagaaggctacttctcgccgcggcgcaccaccggcaccggagatagacctctcggcggtccgccggctgtgcgccactaccgatgctgcactgagtggtctcacagattcagagttgaggctgcatgtccatgaactggagcatgttgctcagcgcgctagttcggtattggagtactggctgaagcggcgggatggcttggtcggcgaaaaagaggctttcgaaggagtcattgagaacctcgttagtcatgttaggagggtcagaaagtagtctttccttactcgggcacttggtgtactatctgaatgcccaatataatatattttatataatctaatgtcgataccagagaaaatccacttatacctgcgaacttccctgcgtagactgcagcgtacgagaggacgtgtcccaagggattttaccccgtaaaagaggggtccacccccatcaaaagctccgacctggctccactgtattgttccaaggttgatcttgcgacctaggtatgtccttgatggctatcattgttcacgatgcccttgttctgcgagatacttaatccctccccctctcgttcctctctcaaaaagaatgcactgaagtatgatgacgcaataatggggggttggttatgcacctctttcagtagtctttttagccgtcttttggcggttttttgtgtatggatgtcttcttcccctcctaacttacctttctatgtatctgggtttctgccttgttcgtacactcccaagccagctcacatcctgccttcctagccgagcacaatacaacccaaaggcaagtatctttgtactcatctcatcaggatgtcaaacagtggtgtcactgccgctctatcttttccgtccgctctacctgataaccacatggttcgggtgtttacctctatgaaccgtctccgtaccgctgcaaatgaggtcttcgcatctcttgacaacaaacaaagcacaaaccaatggcttcttgttcttggcctccccacaacagtcatcaagcgcctcgacgaagaccgtaattgcctagaggcgattaattaccggttccaatggcaaggcaggagcggtctgataaaagtcatcccgacagcccaacacgaaatcatcactacgagggttatgttctctgtgaatgacgctctcgctgcaatgggtctacactggagtgattcagaatgggtcggccatactacctacaagccaaatcttgccaaaggcaaacagcccgacaatgcatttctcccgccctcccgctgcacgataccactcagttcgacgggatggccaactcttgtcattgaattgagaccggagtgtctgaaagcttgagccagctccgcgcagacgcagcaaagtggtttgcagattcgaacggcgatgttagaatcgcgctggttatcgccatcaaggacagcagggttgacattgaaaaatggcaattggctccagaaggtgcgtccccgctggatctccaggtccccgacagccaacaaccatattgcgcccaggagataaccatcacaccacaaggtgttactgggactccccttgtcttgcccttcactgctttgtatgatagagtcccgggcccaggggaaaccgatgtcctcatcacgacggcagactgtttgaagattacgacgaggatgtggtgaagagcacgaggactgtgtgcctgaatgacgatgttttgactttggctacttcccggtatggcttcgagggaaacgctggacgagttgatccatgatttatatttggtatttctctgtatatgctaggaaaaacgcagcatttatgtaaacttctctcgtcatggtgtttctaaatgtaatactcccatcagttcaaaaagcagcaatgtctgagggaacggaatgccgagaagtggcagaggaaatccaatacataggtatttatcttgatatatgtaagcaagttctagtctagtcacaacaccagagagctcaggtaacctggaaaataagatgggagttaaaaaatgagctagccgttgagtttcacgtgaagcattggataaataagaaaaaggcggacgcagccgtgaaaccagtctccctaacgccggagataacatatcataagagaacatggaggaaatgcatttgaaaagcacgcaataaggggtatcttcttttcaaatgcatgcaaagataaacgaaagacagtggaaggccaaggccgctagaaaaaaagaagaagggaagaatattcgttgaaaccccgataagctcattagtccaattcaataaccgtatgttcttgggtgcgaacagccgggctgtgactgccatgagatacattgttcctagggcgtacgggaacagggcccaaagagccttcagccttgcgctttggagagaaggggttgtctgtcacaggcgagatctcatcagtgtcgtacttgggggtccaggttccatcgactttgatctggattgctctaatcccatcgagtccgttcgttcgggcaagctgggcgtggacatcgacaaggaactgatcaacgaccaaggtctgcgggcgtgcatctcccttgcagatcgggcagcgccagttatcgaccatcggtgtcgggccggatacggaatttctggttcttataaaagtgtcacggtcgaagcattcatggtggaagcaatagcgcgagcgaacgggaatatcgaagatgcgtgccatgaaagggtccaccaggtcgatcgtgaggttgtcggtgaccacggccaaatcatcgtcatcggtggtaggagcaagacgctttttgatggctgcacgagattcggcagctgggacggattggatcaggctgagtatctggtcgaactcggcaacctccatgacctccaccccgaagacgaatttggaggtcttacactcatcctgtcctaagatcatatcgagccgtacgctgttttcgcctgttttgatgtactcggtaatgtccaaaggcagatcttttccgttgtgaacctttcggcgcacatagagctctttgtcgttcacgctaatatagaagacactgggccagaaagtgttcgcagtacaccaggtcttctccgccacagtgtccggattgccaggaagacgaatgcatcgcaggcgaatagtccggcaaccgggcctaaaggtccaaaccgaatgttggctctgtttcccgtgagctatgtgtgggaacttttggcgctcatcatgcgtgaaagagaaattccatgtgtagattggctggtcaacgttgacgatggttgggtgtacaacgaatgttttgagataggtaaacagatcagtctcgatgtcattaccatccgaaccctgttttaccagcctcttcataggatcgcgaagatcaaccagatgtagaccgagacgcgttggatttggattcaccgtcataggtgctctgtagccaggtaccgggaagaaagcagagttaagcgaaggctggtgatgctgtccctgagccgcacgtgtgaccggtgaagcagacgactgcaaagccgtcgaatgttgtcggttatgatggttattaggcctttgtggtggcatcgggtgctgggccatgtggcttgttgtagtcggcgtcgtggatatggacgatggagcatggagcaattgcgctgactgtgtaggggtgagagcacttgattggagggaggggttagcaggcgatattggagtcattgttcgaccgtgtaattgttgactaggtatttgttgaccatgtgagcctggcagtgattggtgcctcggagaagatgctacttgtccgatcgatgtctgtatgtgcatttgcatctgtgggttcatatgtggatttgtatgcagatacatatgctgttgctgattcatatgtggactccccggataccaccatccgtgttcctgtctcggcccttgcccctgtggtatgggattgtaatgagattgcggggtattctgcatttgtgggtttacgccagattgatagggcccagcagccggtccaacaacctgaccccggggggaatttgagggaagctgctgcaaaggtgcaccaattgggcttggagcaggtgaatttgtggcaggttgactgacaccagcaaccgaagatctgggataggaaggtactcctggagtagcttgaggcatggctcgattctgaggtctaggaggtggtgcagagtgggaggatggtgtttgtggtgtttgtggtaggtatttaggcgggaagctgcgatactcttggacgaatttccagttgagagcctgctgagtggtcccgggaagtctagagtccctacacttctcaaaagcttccaaatctttccaaaataacttcagcagggcatccacgtctttgtcatggtgaaggtgccgtgcaacacacgtgaacatcaccgacatcaaaatctgagatggacaagcgagtgactgccaaaggtgagataccaacgggggatgacgagcctggtgcaagattccatgccattcattcgcaagccgtgctaaaaactcaggaacaccagacagcacctgaatgtaccagtttgtgtgcatcaactgctgtggagatgccgggaaatgggcaaatccattggtagcgccatcatgcatctttgcattatcatccagaataagcctgagcaatttcatgcccgcgttggggactctaatttgacccaatgtgcttgcatccgtgctatatcggcagtacaattgatgtatcaccaaatagaaagcatccttacgattaatggcctgctgcaacaggttaatccgaggccgaacaatagtggtctggctcaagtgagcagggggtaatgctccctttgcagacaaatcgtccaccaaggcattcaattgagcagaccattgttcccatgtctcattggggatagccgcaatcccagctcccacattctggagcggactaggtcgtgaccctgacactgcgtgttgctgtgtgctagtacctgtgcgtgtgtctgtgagcgagggggagtctgggggccgatccgctcccattcgagaggactgggtcacgcgttgtgacgcggtgagcccgctcggaggaggttggaccgccatgcgctcatcatcgccacgctgtgccgtgagttgtgtagagattggcggcagcgtggaaggtctatctgagatgatcgcatcggcgttgacgggacttgggtgagaatttgtactgagaaccggtgagggaagagccgtcggtcgcgtgtcgggcttttttgccgcatcaacaggaccacgtgcgggaggttgggttagggtctcaccaggcgtgacgggggacattaagacagtctcgctgggaagggatttgggagggactggaggatcaacctcaacgcgaggttttcgcgcggccgaattctccggggcgttagcctgcgggcccatccagtgtctccgcacgccgcctaagaacagactggcagtagtgttggactcctcaatatgatctgcactagcgagcgatcgcgatttaggtgataccatgatgatcgagtaagtgtctgaggcatcaggatgatttggaggttcctttcaataataaagggcgcttacaccgatgtttgattcaaagaatcccagacacctaagcgcctagagaccataataggaatggatccatgcagttgagagtgaaagcgcagtaagcagggggagatgttgcgatagtgacggtcattcgatatgtttgctatagctatcctatactcgattcctctggatctgaatctcaagtgaatctaatccaatctaatccattctaatcctctaatatagatcgggtggacttgggcaagaatgaccgggttcatctgcatacaaggcacatgtacttctgaagtactgtacgaaaacggacctaattgcccaggtatgttgctaattactattcaagctaagcgctaggtagttggtacttatagtgattgtaatcgcaatccctatattatatgtaatcgcagttgtgccacctctcagctcctctccctcaaccacgggaaagtctcccaagtccagactttcttacaatcgcacacgtcactctcgcctttctcttcgaatttgcgtcttaggtttgatattgattcaaatccgagttctgtcaataatttaccaatattcttggtcgcgttgaaaaaagaaaaaaaaaagaaatccaatctatctctacaaggtcgagatccttcgttcgtgctcccgagccccgcgagttgtttaacctaatccttctaatctcccgaatctctagcctttggacttctcacattctctcccctttctcttacccttccgccaaatcacattactcccgagtctcccccagtgggatacgcaattgcaatctgcaatttgcaaatctatccccaagggtgccatgttttgtgttggctcttgactaggatacacggaatattgagatggttaccatgggcccaccgaagggtgttcgtccaggcgacattctggaggttcttcgtaagtgacgtcgtgtgcgacacctcgatttctgtgactccgcgtttttcaggatgcgcccggcttctaacactccaaactagatgaatttggcgggcgcggagaagacgaactggtcatgttaccccgcgacaagattaaactgatcgagttggatgaggaatttggagatgcctggtactacggacagaacctgaggacgggacaaactggtctcttccctgcaagtatgcgccccttccccaggacccccccccctctcaccacccccgactatgatcccaactaatatttgttgcgcgacagactttaccaaagtgggctccccaagaaagaccctcgccgagtcgccagttctggtagaatcgccgatccaattggaatccctcgcgcgcccagattcatcattcgcatcggctgagagtggacagagcacccctcaagcatcgcgccacgttagctccgacgatatgcagtcaccgcaaatcagttctcccacacagcatcgatccgcctcgtctccgctgcctcgccccagcctggcggccgatattcagcaagcctttcgtggatcgatagacaatcatttgaacggcgaagaaagtccggtcatgaacgagaccttgagcgtcattgacgagcacatcacggatatgaacaccccacgtcacagcgtgtcgacccaggaacccaggacgatcaacgattccggcagcgagtacagcagccatatcggccacagggcttcttacatcaatggaaatgagaccgacgacgaggagcagagtcttccaaccgagcaagaggtgcggaaatggagtccaacacagacctcaagatgcttgcgcagccttggcattgatcaaaaacactgtgacatctttgaagaacaagagatcaccggtgacgtgcttcttgatatggatcaagattttattttcatgaaggagttcgattttggagtcatgggcaggcggctcaagacctggcacaaggtcaaggccttccaagaagagaccaagggcttcagtcagcagcaagccccaagaggctctatctcctccaacttctcaccttccgatgaacgtgcattgtctcgcgctggacacaccggaccacttcttcctcggattcctaccttgtcagaaaagaccggcgctggttatccacgaggctctgtgccggtgcagcacccccgactggccagcaacagcagctcccccatgacaccgcatacccctccgtacagccatgaatcaacgagaaggatttctgcggcatcgctccgtgatctcaaccaagcgcgtcgtcattcttccattgacgccacccaacgaggcatgcctgattcgggttttgttggtcaccagcaaaagaaaccctcattcgaccggtcctggactctgaattccggcccccaagccatgcccgctcgcccaggaacctccgcgggcactagtccgggtggcttccggaatggaccgctgaccgctgagtcagattcttacaactcctatgtcaccaccccggatcagattgaggacctagatcggggttatttctcgggaaccgaggttgattcgcgccgggcccgccgcgttctacagaaacgggggtcggccggtgtcgatgtaaacaatcagtcacgaaagtcaagctacgcagatgattcataccaagtgatatccccagcgaagcgccactctcgcattggcagtgtggactcgatacgtgacgcagcgaatcgtgtctcccccgcggccaaggcctatcacggcacgccaccgaagagtcggctgcgaagcttgagcacgcgcgtcttaacggataaaagtggaaccagctctcagtcgtcaaccaccgatagcaaaactagtaacggtggtggattcttcgccaatttctctcgtgtcggtggcaaaggtgattcggaaattcctcgcgcttcgccgttgcaattccagccactgaaaaatgccgggcccaagtttcgccgagccatgggccttcgagccatatccgacgttgctggaaagaagcttgacacatctgcgctgcctgattcgccgctggagtccgatcctacctctgctcgcactggatccacaactccatcggcgacgtccaagagctcggaacggcatagtacagatgggtctggtaaggccaccactgacggacagggattcgtagcccgtcctcgaacggccaagtctaagaaagagactagtgcctatactcggggtcttgagaagaagacaccgcaggagcaaatggatggttgtgactacagtggatggatgaagaagagatcttccaacttgatgaccacctggaagccccgtctgttcgtcctgcgcggtcgtcgtctgtcctattactattccgaggacgacaccgaggaaagaggcttgatcgatatcaccgctcaccgtgtcctacgagcagatcaagatccgatcattgctctacacgcaaccatcaccggctcaaccgcattacctgccaatgccaacaacaccgtggatagccctagcgggacgaaactcaccactccctcggtcatccaatcgctgaccactaaggacggcagtgggccgttcttcttcaagctggtgcccccaaagtcaggcaactcgcgcactgtgcaattcacaaaaccagccacccactttttccaggttgacaatgtccagcagggtcgtctgtggatgggagcgttgatgaaagcgaccatcgagcgtgacctaggacaggcagtggaaaccaccaacaagcaaaagactattagtctaaaacaggcccggctgctgcagcagcggccggcagatcttgttcctgcttcgggtagcaccaagaccgcgcagaccatcgatgaggaagaggaagaagcgggtctgcaaattgagggtttgaacctcagtcagtctgatgttaactctctcgaggacacgaacggcagtattgatattaacaacacagatgaaggcctcgaacgacctatctccaacccccttggggatttggataatggccagtcgtccttgcttccggatcctctagccaagacggaatctaagtgaacatttattgcggcctctattatttgagtgtgaccttgcttgcaattatgtgaaggacatattttgcccattcttgtttttttttttttttgctggcgtttgatgtgatatacccctcgctcagacttcttccctttgttgactcggcccaatttcgtcattacaggtactttggtcgccgggggatttatgtgggagtatgtgattaacttgcttatcgacacaaagttgactggatctgagcgttcttttctattaatcgcgattgcaaatgtagataatacaataattcatacaaccatccatcccatggatggctaattgcttctaatcctcatttccatagttcccaccgcccagtataccgccaagtcttagcactggcagtatatagccaccatcctactaacattgtatacaaacagcttaattgggatatctttgatactagatcatcaatccttggatgggactgttcaaaatgtcatgactataagttcttcttttgtcttgggtacttcgatcctatagcagatgtcaccgtgtatatgtgcgctgtctttatcgattagcgtccgcacttttgtttcttctccttttcaccattaaagacaactcttttcaatatgctgtataggtctttataacatttattcttttcctgtcattttagattcctcatgttcctccgctggctgctctcccgcacctttgcgctccttcttccactcacagtgatcgccactgtttacctctatctctacccagtcttcaacggatgcgcctttcctctaccacagtctacctcacggtcgagtgagcagcagctataccataattcagtgatcaacacacttctccaacaccttggcgtttcaacctcagactcaaacagtcaacctgccatctttagactcctagtcctcgcagacccccaattggaaggcgacacctcgcttcctctccccgaatatgaattatacccccgcattcagactcactggcgcgccatccaggaagcaattgggaacgcctccacttcacctctactggacgaggacgtcctctcaaacattacaactggtctccagaccctcgcaaccgaagacatcccacgcgccttcaaatcaggcctgaaacgcatcgacctctttggcaacgactactacctcgcgcatatctaccgcacactcttttggtggacccggccgacacacacaacggtgctgggcgacttagtggggagccaatggatctccgacgacgaattcgcccggcgcagacaccggtactgggaccgcgtgttccgcggcggagagcgagttgacgacaacatcaccagaaccggtgctgcgggttggagccagagcgaaggcagcaatgcgccgccattagaacccctaggcgcggatcgggcctgggccaggcgcgtgatcaacgtcgcgggaaaccacgatattggatatgcgggggacatcagcgaggcgcggatggagcgttttgagcgtgcgtttggccgtgcgaattgggatgtgcggttcgaacacccgcccgtcttgtcctcatctgggtctgctggagaccaagttgttacccctactctacacttgattaacttcaattccctcatgtttgatacccccgcgctttctacggaggttcagagccatacgtattcttatctgaatgagcttatcgccgatcgagtctcgccggtcgaggaccgatcggcttttactttgcttctgacacatatacccctgcacaaggaagacggcgtttgcacggacgggccgtatttctcatttcgtgattctgacgacaaggacggtcccgacggtgtgccccggtggcttaacggtggtctcaaggagcagaaccatctcagcgacacactcagcgctagcgggatcctgcaaggcatatttgggctgagcggcgatgagaatgcgcttgctggtggccaaggccgaaacgggctcattcttacggggcatgaccacaccggctgcgatactgtccatttcgtcaaccgcactgaaacagtcggtgacgacggttcgcctcgatcttgggagtgggctgcgaagcgcttcaatgagagccagcacattgacgacccttctatccgggaggtgaccctccgctcgatgatgggagagttcggtggtaatgccggtctcctttcggcgtggtttgatgaggtcgctggcgaatggagctatgatatcactatgtgtccagctggcgtgcagcatatctggtgggcggttcatatcctcgtgctagtgacgctaggcgtggctctgcttttgttcttgtctggtaatgctcagccgaagacgactacttgtaacgtccagtcagaccagaagacccaaaacagacagaagaaataattgggtcgtagaactgtgttttcctgtattaatagcattggatgaccgagcgtcttgcatttggatacatatattgcagactagtactccgtatatattttcaaaataccctcaatcagatatagaagtgtatgagttgacctttgttggagtcatgccttgttgtacagttgcgtagagatagatccgtttacagaaggcatataaaggacctacgaagggtctacgtaaagccattggtggtcatatcagagttcatatatcggccaaagaacaaacaaccaggaccaggtccccctcccatacagctcgcctagagcctctaggccagccctcgaggtaatgggcaaggcgttgcgaaaggatgtgattattttaaagtaatacttccgagagtcgccagcaaagggagggagaaaagacgaagatgggggatggaaccggctttaaaataaaaacagttggatttcgtcaaatggacaccacctgtccagctcccattttaatcctatggtctcatatgcaccgcattccaggtcccaagcagatttgaggtttggtatcgttctttttctttaaaattcgggttttctctctttacataacgacaccggagttggaggcaatacgctggaaaagaagtgttagctttttgaatgagagcattcgggaatggaaaaggaatccatttcccatgtggaagtgtataacgtacgggccagagctcagcagcttcctttccgacgggaccggtgatagcggaacccttcatctcacccttggcgttgacgataactcctgcgttgtcctcgaagtacaggaagataccgtcggggcggcgccaaggcttgctctggcggacaaccacagcgggcatgaccttcttgcggagctcgggctttcccttcttgacggtggccatgaccatgtctccgacaccggcagcggggagacggttcaggcgggcaccgatacccttgacggagatgatgtacaggttgcgagcaccggagttgtcgcagcagttcatcacggcgccactgtttgacgaaaatagacccgttagtaaattgttctagatcttgaagacgtcgtgttttcgaatgctgaaagtggagatccaattttcttttcctttcttcccgccgatctttttcgtttgttgcatggcgagtgttttttctgatgacgtttgatcgactgaaaatgacatgtgggatccggcgggcaagaaaggcgcattcgaaacagactagacgataagaaattggtagacgtacacaggcagaccgagagtcatcttgagcttgttgccggcggcaccgccacgactgtttgatcgttagtaatttcctctttgtcgattcgttcttttcccaatccgagccccattcgatcctctcgacacgaaggtgttgtgttgcttgtcgcttgcaaaattattctgtatcggttcggaatcgaatgggaccacgtagggaatcgctggaagactcaccctctcttagacatgatggctgatgatcacgggggaagttggtgaaaaaggttggcgacaagaggtcgaacgtcgaggatctaaaccggaggtgtgctttctcgcttagtgggcaaagtgcgtaaaatcttggcattggaaggtgattggctgttcagacccatcagctttgccctaatactaacccgatctgggatagtgccaaattttaatgcctgaggcataaactctatacttctagggttcagatgttgtgacgttttgaaagattgcatttcactgaatagtacatttgcaaaaaaaaataggtgaaaggaaaagcagatagcacagggatgaagataaaatatgagatgattcattgaaagtccataaaagcaacccgccatcccctgaaatatttcgaggttaaacctcgatgtgagtctgctacgagtaatgccttcccagtgccaaacaagattcgagcacgctgttaaaccgataacacctttctgccattgtccgttgcgccagatccgatattgtcgtctttgcatcacagctgattactcctctttcttgggttctgtcttgtgttccaagctctcttccttggtggccgttgcctcggtgtccgcagtaggagcagaggcttctgcagtcctctcaagggtagagtcggtagcctctttcgtaggggattgggcccgcacaggggaggcagtggagccctcggtcactgatttctcctcaataactgacgcttgagccggagcttgttctgatgtagtagcttcagggacagcagaagcgtcctccatggtagtatcttcatcatgagggggaggagactggtgttgagaggtagtagaggcttcatgctcctcactttccatagccatgttatcagcatcagtcatgggggtttcatcagcgtgcgaagcttctaaggcggcagaaggcgcctcgggttcagtgcgtggggcattggccatcttagtatcaaggccgaaatccatttctacatcaaccgtagatgagccatcttgcggggttgccatgccactatccagcccagagtccggctcgagatttcggtagttgacttggttgcgacgccgcatgacgcctggttggcgacggataccgttggcggcgttctcgtcttcgtcctcgctgtcactgagctcgccagtcttttctgtgcgctggtcgaatcgtcgttgtgtgaaccgcttgtctttgttctcatcctcatcgaggtcatccataacgtcatcagcctcgtcgtctatgccacccacgatagggttacgcggtacatctgtcatttgaaccgaaggagcaaatgccgtgcgcttcaggttttcaacaacctggttgcaaatcttgtccaggtattctctggtgttggcgttgtccatgttggaggggcggacatcgagctgataatcaggagcgaagtactaatgcaattagtaagtgttatttgatctggaagatataagaaacttacctcatagtagtcattgtatggcagctcagatcccaggggctgtccgacaaggataccggtctcataagcccatgttcgtgcaacgttgcgcatggtgtagccaccaccgccaacaaccaaggttggcagatcgaaactcttgacgaagttgacacagttggcatgtcctcgcatactcagattgaagcagcccaagcgatcgccggatagactgtcaccaccgcactgaaggaccacggcctcgggacggtaccactccatcacgctcttaatgacaggctcaaagatgctcttatatgtgacatcagtgatgccatcccggagaggaaagttgactgcgtagtttttgccctgcccgacaccgatgtcgcgaagctcaccagtaccagggaagtactcgccgtacttgtggaaagaacaggtcatgacgcgatcagtcgtgtagaaggcctcttcgacaccatcaccgtggtggacatcaatatcgacataaagaactcgctgtttgaagcgcagaagctccagaattccaagaacgatatctacatagatgttagcttctgagacagatgcttggagaccaagggactataccattgacatagcagaagccactcgcttcgctcttcttggcgtggtgaagaccaccagcccagttgacggcaacatcgcatttgttgcggttcagtcgcgcagcaccttccatgctgcctccggcgctaattccacagaactcaaagagaccgtcaaacacggggcaatcgtctcctacattgtaccggctctgttccttcacgaagtggtccatattgtccggtgtgaccttggacaggaagtcgatatattcgtcggtgtggaactgggtcatctcgtacttggaggcaggtttcgcacgctgatttattagtgcaagggtcaaacaaataaaaataggagagtgctcacgtagatctccattttcttatagaggccatagttcatcaccaagctgtgtgtcatgcgtatgcgatggggcttcatggggtggccggatacataggcatagttgcccacatcggagtcgtagaagtaagcgactttcttatttttagacccgagaagcctatcagagataggttccaaagccatgttgcagagagcgctgatgattcacgaggttgagagtggaaaagagagtggaaaaagaagtgaagttcaagaagtgtaagtgagatccggggaatgaagtagcgaagttgcaggcgcaatgcagatatgcacccaagaggttgaataggcaacgatggcacctattgtcaccagatcccgcaatgcgaagattaggtagcagtacttaatcacaatagcaagccaatgtcattgttcacgctattgaagaatagattgaggagagagattcgcccgcgaaggagcggaagccgaccgaaccacacaccgccttcgtcaggcaaagctcccacggctttgctcatcatcacttaacacgtcttcgacaaccttgttatcttctcgctaaaatcacatctgtcggggattttcgctaatttgtatctctctttgaacgctgttccggaaataccaagctactagagacaaatcgatttgctccggagctcccaaatagcgatagcttcgtcctctctactctcgtttcatcaagtcttgtcggatatctcttaactatggatcgtcttaaccggatgctccaggccgctcaaggcatggggatgggaggcgctgctcctggtggtgtaagttggataagactaatctccttgttggaaggcattaatggcaacatcctagcctagcttcaccacgtttctctacattgactaatgagagccgttatttaggatactccaaacctgatagataactcagaaaccgtccacatctcctccttggctctgctgaagatgctacgacatggccgcgcgggtgtcccgatggaggtcatgggcctgatgctgggcgagttcgttgatgaatacacagttcgggtagtggacgtctttgctatgcctcagagcggtactggagtcagtgttgaagcagtggaccccgtgttccaaactagaatgatggaaatgctgcgacagacgggacggtaagcctattagctggtatataataggggagtcctccatgctgatgatttcgtacagaccagaaactgttgttggctggtaccactcgcatcccggtttcggctgctggctctcctcagtcgatatcaacactcagcaatcctttgagcagctcacaccgcgtgcggttgccgttgtcgtcgatcctatccagtcagtgaagggcaaggtcgtcattgacgccttccgtctcatccaacctcagacagtggtgatgggtcaagagccccgccagactacatcaaacttgggccacctcaacaagccttcgatccaggctctgatccacggtctcaaccgccactattacagcattgcaattgactaccgtaagacaggattggaagagaacatgttgatgaaccttcacaagcatgtatggaccgaggccttggagatgagtgacttccacgaggagggtcagcacaatgtggagcgcatgaagcagcttgttctccttgcggagggctacgagaagcggatcaaagaagagacggagctgagcaaggatcagctgaagacgagatacgttggcaagcttgatcccaagaagcgtatgtttttcccaagacccccccccccccccaaannnnnnnnnnnnnnnnnnnnnnnnnnnnnnnnnnnnnnnnnnnnnnnnnnnnnnnnnnnnnnnnnnnnnnnnnnnnnnnnnnnnnnnnnnnnnnnnnnnnnnnnnnnnnnnnnnnnnnnnnnnnnnnnnnnnnnnnnnnnnnnnnnnnnnnnnnnnnnnnnnnnnnnnnntgatcccaagaagcgtttttttttcccaaagcccccccccccccccaaaaacatagactgacgctttgcagacatcgaggacgtaagccaaaagttgattgaggataacattgttgccgtctcgcggcagatgattgacaaggaagcttcggtggcacggcagtcattcaaggaagacacgaacggtgctgccatggaagttgatgaagatctctaaagagttagaaaagggtgccaatcaaaccgcattaattatttctgattggttggactttatgttaccaaaccagaccaacagatgaatgaaatctactcgaattttcacataataataagaaattcattgtcaacaagaatggcgcttggcctattgttggaagtaagtgtacctataattctgtttcatgggatctatgcggcgcgcaatatatatatatatataatcgtaacagtatgaataatatccaccgaataatgaactatcaagactccaacttgactgtctgaagcgagttgctcaaggcttcgagaacaccaggggagtaggcccgtaggccatcaaaggcaacatcaacgtcattgtgctcatgtttctcgtgagtgtcgtattgagtgtcgtattgagtgtcggtccagcctctatcaggaccccaaaggacctttttctgagcatctcgagtttccgtaagcaagcgagtcatcaaaggtccattcttttctacagagggccaggcatcgaactcaacctgaactagacccggcagccgttccaaaatttgatgtaacaatttgccacagaagttggtatagtaatccttggagatacgaaagccctcgaacacagggtgtgaagggtcacactgcacaaacactttcaacgtgcgcacaagctccatgtcatgtaaacccaagccttggtttacaacccatgacttcgggggtgcagtccagcttgatcccacaataaattcgattgtggtgatcgaagagcggtggcgtggaggcaaagcccggatcgtgggcatgcgtaagaaatcctggataggaaacacacggaaggtctgggttgaatagaagtagtgagtggcttcgtcgtggatttgtctcgagacaaggaacagggcgatgcggtgtgagaacggcgctagaggtttgctcttcttcgccgaagacccaacattgccaccagtgcgtttcgatgcactctttcgagtcggcgtgaataggacaagattataaatgcgcaggcgaatctcagacggtagatggaggaagggaaattgcagtaagatcggaggttcagcgtctgtttcggattcggcgtcggaaagttgctcctcaaaacggagcatgttctttttgaaccccatgattgaaaggtatgtagatgaaatttatgggatacaggcgagtctagatttggacaggaagatcatatttctggtaaacaggtagaaagagaagaagaaaactaaaaagatttgtgtcccacgatcggagcgcagcttcacgggtaaatcctttgctgcgctcttggtagtgggaatgaagaaggtcttcgttggtctccccagctaatacaacccggcatgcagagagaagttgcttgataggtcaaattaatgtctgggtgaactttctgaagaagaaaagaaaaaaagaagaagactcggtggccgaggatgtcgatatataaacaacctgcacggatggttcgggtccaccgccgtaccgaatcgcgccgacttttaacgggagaccgtggtttatcccatcattcagaacatatttgtttcaacccaatacacaatgcttagtcgtgcagtcttgcctctaacgaggccaaatgccttcgcatctgccgttcgggcatcaaccctgtcggcgcggccttcgttgtacgctgcctacaagctttccccgggtatccagctaagggcgaagtcgaccaaaccgaagtcgaaaacttccaaagcagctccgaaagaagctccgaaagacttcgacgcagagcaacccgagtttgatacaaaagctgaacctacacaaccttctgaacctgtgaggcttctttcaactttccattgaaaggaatccctctgacgttgtctttctaggtcgaacaacccccacagacgcctcttcccgatctgacgcaaggtattccatcgacgctagccgcagaattggaagggcgtatgaagaagggaccattgaatctcacagaagaccctacccagtcagaagattatggcgcggaaggcagaggtggtggtgacatccccaaaggcggatatgagacatccatcgaccgccgcaaggcccgtatggccaatatagtatacgcagtcatgttgcttggtggtgtcgctggtatgggctatttgggtcgcaactgggaaaccgaagaggagcagcggcaacaccctgagattccgtcgggatggagcccgggtctttggtacagccgtatcaaagcccgcaccagcgatctcaccagctattacaaggaccctgctttccccaagctgcttccggatgaggacgccgagatgcgtcagccatacaccttggtgctcagtcttgaggatctccttgttcacagcgaatggacccgtgagcacggatggcgcgttgcgaagcggcctggtgtcgactacttcctccgctacctgaaccaatactatgagctcgtcctgttcactagtgtgcctagtatgatggccgaccaagtcctacgcaaactcgacccttaccgcatcatccgctggcccctgttccgggaggcgacccgatacaaggatggagagtacatcaaggtatgtattcttctttcccccccagtcatataatgctaattgtctgataggatttgcaatacctcaaccgcgacctttccaaagttattctcatcgacactaaggaggagcacgcccgctaccagcccgagaacgccattattcttgacaagtggactggagacccgaaagataagacgctggtcgccctcatccccttcctggaataccttgctggtatgggtgtcgaagacgtgcgtaccgtgctgaagtcgtttgatggcactcccatccccattgagtttgccaagcgtgagaaggcgatgcgtgagcgctttgagaaggacctcgccgaggagcagaagaagaggccctcgcgtggtctgggcaactttgctgctgcacttggcttgaagtcttctgtcaccctgaacggcgaacagacaccctccgagggtctggcgcagggtaagatgctctgggatcagatccgcgagcgtggtcaaaagaactacgaaatgatcgagtcagagatccgtcagaacggcgagaagtggctcgctgagatggcagccgaggaggagaaggcccgccaggagcagatgcagagcatgaagggctctttcaccggcatatttggtgctggctccaagaatgagtaatcggcgcaagccaattacttttctcctctagcagatcatcaggggtctgtttaatgaactagtgtaaaataggtagggtttggggttttggatttttgtacaaaattttagtcagaaattttaatatgagaaagactgagatttggactgatatcgaggtcgttgggctttggatcccagggtatattgttgaaataggaatctagaaatatatgttcaatgagcttttttgatcatgtcaggttcacatcttggaagacggagacatcccatattcctgtcatatcaaagggaaaaccgtccatcgttccaaaagtattcgatatcgacatcatgtcgtcaacgatatcgttatttgtttgggtttctggcagcgatattgcggccgggttgaccagcccgctgtctgccatcgcggttgtgaatgcctggtccattgtggcaccagttccgggaagtcggtgcataatgcgttcgcagtggtctaggcacatgtctgctacatcccagtcttcttcttcccgcacacgacgcaatactgagcgcagggtttcgacgttggaaagacaggatcgtgcaacatcgctatcggtggtctcgaatgcacaacgaactagcaatgtcgccgttgacgtgagatgaaaagcgctatctgtcaagaagattaggaacaaaaagcgatgtatagaaagaatacttcaacttacagggtagccagaactcagtgaaattatcttttcgcaaagacgttatgaatccaacaatctcctctgcagaccttctgcattccgtttggaaatagcgacgtgcctcggtgttttccgtttcagagttgttgacttcctgcgaggttgttagaaaccatcctttcgattttcccgctcctccggcttacatttagttcaactcggctgacaagcattttgacggccaagaaagccagttgcaagctgcttgctccatatatccgttccccggtatggattgtgggtcctctcaaccagtccggtagtgagtcttcccatatatctaaatctgttcgtatttgtctaagcttcttggatgtctcgcgtgcaggtttgtgttgcaacccataaaccagtggcaacagctcgcctaaagtctcggtcaaccggcataggtagatgtgacagtgtgctgctctcacacgctctgtagtgcggaggtttgatgggactaatacctctacggtgggtagaggcacgtcatattgatttttggaaatctggggtgggacaccatgaccaaagcttcccctatttattgtcaggtttgttgcaagccaaaagaaaaaccgaacgagcttaccaacgatcgtgaatcacaaccccccaccacaggcgaatccgctggtttttttctgcttgtgagagcttccaattgctaggatcacggttcaagccaaggcaatttgccaaagataacatgcggccacagctgacggcgttgccagtcatggagaaaatgggtcttcctgttaggtcgatcagcgcggcgctgattgtgtccaatccgggtgctgagaattcctcatgcaacgcggcgacagtcatgttgatcgcatatcgtacgtcgggcttcggatgacacgcaagcttttgggtgtgtttccaatatacgagggacatggaatagacttgacacactagtgcagctggtgggtcgtgcaggtcatcggcgatgaatgattcccagaacgattccccgtcaaagattggaaaagaaacgttaaaacgatcaatgaagctagagggggaaatattagcagggtagaaaatggaaggaaaggccaatggtcaacatacagtctcactaggtcgtgtttgaagggcccgagtatttgttcgagtacctccttctggttctcaccaggaggcgttcctttccgcatacctttccttcgccgggagatggtggtgtaaaggactggtttccgtgggtcgctagagtagatattgtacgggtggctgttgggctcttccgattgactcgaccgctctgggggcatatgcttttcaatgacttgggcatcctcggcgaccatagggccaacaatgagaactgactcattctgaggatcatccatatctttccgccgcagatcactttctcgacgaccacccgacgaagtcgttccatgggggctcggcccatttatcggctgccggggcgggttattttggcccatgtgggtgagttcatctgaactacgtttacgcttatgtcccggcatggcctccaacgatggaggccccggccaggatttccggtccgcgccactcaaaaccgaagcatccgcgttggcttcctcttgatagtgacagtcggcaccttgaacgcgacatagaagacaggattgaccggggatatcgacggtacatcgagacttgcgcttgcgacacaagtcacaggcgcggaccttatgggaacggtacggtcgggcgccggcattgaatccgggagatggaagtttggacgaggaattgacttgaactggtgcaggcgacatgatgtgcacccaagtatgaggcagttatgccgagggataatacggggaaagcgaagatggtgatttggagattttggtcggggtgttctgggagtcggccgattggcggttggacaaagtgaggggtatgagcacgaggcctgcaaggtagggagaagaccagatcggaattgggagctccaaattggctggaaaccgtacacgagatgtcgaggctacatgcacatcatattgtgcaaaggaggtccccccagatatcagaatccggcgatctcattttcttatcaaaaattgaactgcgggcatccatggatccatgtggggaatgctgactcatgccacgtgaaatcgctgacataatgactttctgcctcaggcgcgttctatttttatctttggacttggcgtgcgtagacaataatgcaggcgatcgacatgagttgtttcattgacattggtgtcccgcattgccttatggggcaagaaactgcacagccacaaggtcatctttttctcaacaatgtccgcggcgagcttgatctgttgtatgtaggtcgagagcggtcatcatggtggatacctcccctttcgaggactctttcgtccatcaagcgggctcttctgtatcgcccggcctaaagacatactttgaccggctaccacttaacgtgattgagcagtaagtttctatctcaccaggtagtcgcaaccttgtgttcgtccgacatgtggccttacggtcagtcattgactgcaattctgactaagtcaatagtatcctgtatgcgtccgatgccaatacatttgcatcactatctctgctaaaccgaagatggaaacatgcgtccgattccgcggcattgtatgcctatcaattgtctcgctgttcatcattttcctgggctcgcggggtcatttctgaggcagaaaatctgactaaactcaagcgccaatttgttaagcaggtcaggcaaaacgcgtttgatgcatttttacggcctcggcaaactctcctgcgattaatttcaagttctatgagctcgtcgatggccttcccacagggtgaagtttttcgattctcattttcaggaaatggtcaaatggtgctctgcatcagctcttctcgcattgtcatactagacgtggccaccgacccagtcgccgtcaaacatgaacttataactcgaaggcggcccctaagagccgcaatccgtgatgacggctctctcattgccgttttgtcctccacgcatcgagttcatatctacaagctctctgacgatgaagccaagcacattcgagttatcactctggatgatgctccaagatatattaaattctctccatcaggtagtgtgctagccttagcctttgaggatagtattgaggtatacgctgtggctgaagaggctttgtcgaccgaccgtcgggcggtgcgttgtcaccgtgtcgatgcactttcattttcgcctgacggatcgatgcttcttggctttacggctgaaggtatcgtcaccatcactcctccgttttataccgagactggaacggatgcctcacccgaagaactcgagatgcgaatgtggacaacacaaattctcttccctgagacaattagttgccctatcactcacgtctccctgattgctggttatgaggaagccgatgatcactgggtgatgggatatgacaaacagttgggggcgttcagagcaatccaattaaacaagaatgccggaatcgtttatttcgccagtccattcctcgcagatgaatctcgggaaatgcaaccaagcatgagacccgccacagatgaaactggagagctttcagctttagggttccaagattcagaactgtggatatatgggatgcctggcttgggtgctagtggaatcactgatacccaggttggtggtgatcatcattatggaggttgcgcgcctcgcgacaatctagcacagcttcagaagatcgttcaacaacctaagatcttgatacgggggcggcgggtgagtgacatgcacgggatcacatccgctcattgggtacgttcggattcaaaatgccgtcggagactagtcgcggtagcacctggtggtgtacgaccacagaaccttggccgagaagatattccagttgatggtggtcgaatcctcctccttgattttgagcgctctaccatgaatggtgaaacgactgagcttgacatcgaagttggagaaacggcacccaagattcttatggagccggactcctctttggccacggaagttgagcttgaaagaaggcgaacacgactacatcgtggcgatactgctacaagattcgcggatcttggccattcagcgactactcgagaatcccgagctctgccacttcatttccgccgcaacagtctcgcaattcctacctcgccaagcgagacttctcccggcgatataatcgaccttccatatgacaatacgcagcctcgttccagtgaagttctccatcgagctgccactgtggctgcatcaacccgtgggcgatatgaccctcgatatcgtaattcccacgcccctcgacagattccccatgagagtgacgccgataactgggtgccaccccctcccccctacacagcggatccattgccagatggtctaccgagaacgcctctttccccagtcaatgttgtcgattctgtcccccagcctgaaagagaagcaaccgctcgtgtcgcgcagcatccaacccgcccacgtccacaatctgtcaatctacaggggctcggcggtatgactggcgccaggcgcaggggaagttccatcggcagagacttcaacccagatcaattaatcccccaagattctttcacaaacaacttcgcaccacaacagcctggatctgccttaaatccacctacagtgatccaacctaccacgcctacgtttgctgtgtatccatccgaaccactcctacaagagagcaacatgcctcttccctacttgaggtcctcggcactgggcgatgcacttggcgatgcctactttccatactctgtgtcctcgccaaaccttctccatatcccacagccatatgaagacgggcagggcactgcagcagatgacgagcatgacgtacctgagaggcaacggtctttccacaggcgagtctcaaccgaaccctctagcttaccgccaccaacgaacgaggaatggcgtcggcgcattcaggattggaacgataacacaattaaggagcggagccgtaagcgaagggggaagtgcactgtcatgtagcctgttttaccatatatccaattttcccgtctagaataactgtcaaattattaaaacaaatatttgtttccagcataatagtcatatcttaccacctccctctcatccgaggtcaaccgctgattcgttcgctcccaaatcctgctccgaagtcgacgtagagggtgctttcctcttgtagcccgaccttggaaagaccacgccaggacctcacccaaatgtaagtgaatcatcgctgtagcccgttggtggaatttctcgtatgcatgttgcaatctttccctcggtttctttgtgccgaatctgggctaattgccgcatcggggtgactggaggggtgtgaaaagtgacgcctgtactacgctttgaatgccatgagctctgctcggtcaaccaggagggacgaattgataaactcggttaagttctcctggttcggcatgattgctccaatcctatcgtttgcgtagagggtctagagccacagacgccggttggaccatcaaacagcactgggtccgagcctctcttgcatgacgaggatggttcttgcagatctccagtctcttgttaatgctgtgagaacaacaagcattgatactgttagtcaaggtgatcggaacccgatcccattttgtcgatgttgtcagtataatctttagctggcggcctgactgtctccccatcagcaatcgactttgccattttgttggcatctaatagtagccttctctggctgtaatgctgagttcttttaagacaatttacatattgaagataattatgtctatagtatcagtagatcactcctctatacacaaagggtctttggagaaaagcctgtgctgagtcgatcctgccagcttcaactgcatgtttcctttccttcttgagatctaccaccattagaccacagctgctttttaataggactacaagatcaagaataatcacaacggaacaatattattgaattgaccgaggtgaagaaagacaatcaaaaatcaacaacaaaaaggctatgctttgtggggtatcactgaaacaacaaaaaaagatcccagtttggatctgtacaaacaaaacacaaggaacccacacaacgcgcatgctcatcccagttttaatatccccttgtaccatgtcccatgtttcatatcccatcatgatccggagaccatacaccaaagccggagtttaaccggtaagaaaggaaacactgggagcactgatgaatcgatggaaggagtcacggaccctggaaaagctagcagtcagtaaatggaaatacaaagtggagacgaccataaaataccagaattttcttctttcttcgaaatgatagttgtttttgttggttcctattcaagggcctcttttcttggatgcccgaggaggatgaaggtagaaagtggtcccgaaggttgtcggaatgtctgtccaggaggcctattccaaggtctgaatggaaggaaacgtatcgagcaaaattgatgatggacgtgaagaggcttgtccagaaacctgtttcaaggcccgcggagagaagaaacaaaggtaattgaatctgaattgagtgactgatcctctcttgattttgttggattgacgtagaagcatgctggaaatcaacggtccgatatatggtcatggcgttcttgatccagccaaggcttgtcccatagcccagtgagaaaccacttaacctgagttgaccggcaggtggtgtggttatgataagctgagatcaaattgtttggttttctcccaatttccgtccaactgaagccgtcccgtaagctcagtggaagtctttcttttccaggtaatcaaagcctgatctttttgggaaaactgactgttttcatgtcggttgaatgatggatgcacatgaatgaccgtggggtcaagtggttggagtatggaatggcaggttcggtgattgttgtcctgcaaaagaataaggaatgaactcagccaagacctcgttaccaagaggctgtggcgaggaatgtagtacatggaatagtgttcacagatagtcgatgtgaacccaacaggattggatttgaaggcatgcgaaagacgatcaagatgtgtttttaatcgaacatctctccaggaggtcatgaacagcccgatcgtacgagattccgtttgattgttgatgcagccgagggcgaacgacactggagagaagatgatgataaactcgaagagggtaagatggtcgactaaggatgcagtcggctcgccgtggataaggattgaccgatgcgacttctgttcttcgatttaatggtcgcgcccttggactgagcctcaattggagaatgaggcacagcgaaggaatattttgcaagggtggccgtggtcgagagccgaagaacagaaatagaatggacaaatcccaaaagtgacgtgtcgcaagagagatctctcaccttaagtgaaggtgagaaatgaagtgagagtgaggtgaggccagatcttttttttgttgattgtcatcatttttttctcactgtctctttttttttgtttttttttgtttttgttttttttttcttgcatattggtcagtcaactcaatctccaacccaaataccatacgaaaagcttctgagaacgctcaacgcggccccaacacagcattgtaccagcaaacaaaagcgctgcgggacagccaagaaggacctaaacaaccctccgaagagaggagttccttcgaggtgtcccactcagacacttttgcggctggtacatgtcccagcttcaccgaagcgtctaggcaggacgctgtcgacggcgacggccgcgggactgctggggaaggacatcattgggcgaagtcgtaccacagtccgtaggagtatcaatgcccacattcgcgaacaagggagttggagagagaggaccactctgcggatcaccctgctcctccagacggccaggaacgaagaccggagccacagccgacaaaggcgtcgagctcgaagacatcgcaagagaagcactggaagcgtaagaggctaaaacattggaatgttttagttccttcttttcctgttgtgctttctttgcatcgcgacgtctctttgcttgcgacggacggcatttcctcctgtagtgccgcggggtggaaacaggacgctcatcttccgcaccgttaccagtcgattccgcagccggagcctcagaatcggactggtcggaggcgtagatatcactcgagttccaagggtgccgagaaaccaagttcgtgcgagcgtcatccgtagtgttaaccggtattatggaatcgcaggccgattccgggtccagtgacggctcatctcccaggcctttggtgatccggtggacccagataccggcaaacagagagagaaccgacacatgagacacagactcgggacaactgtctgcagccatgacccaagcaagaatttcctcatccgtttcagtcgggcccgcgagcagacgatccatctccctttcaaaggaagatgaatcatcctcggccacaaattgcacacgtgcaatctgcggttggccctcgagaaccttcagagtccactcaatcaaggtttcaagaccggagaacaattgccgtgagtaagcaatcaaagcccaggggatctggacgaagcaccatatagcgataaacaacaacgtggcgacgaaaccttgcccgggcttggacctaggcgagtggatgtcgacaaactccttgggatcagaagatgtcactccgtcgcttgaccaagaggaaaccgggatgggtaccaggaacggggttggaaaccaggacggcatatcatcgaccagctcaggccggacgatgatatccgtaccaaggaaaagaaccatgtccgtcgagtttgaatacccatggccaacgtgagagcgcgactcccatacaggatgctcgcgccgggaagcatgtccgcactcggaggcaacaacgttcaccacgtcacagaaggcccaagattccatcgtcagctggaacgtaccagacagacgccgcacgaacgactgccctggaacagtgaaccccgggatggggaaccactgactccagagagtcatgcccacgaagatccccaagaagggaatcaacatgttgaaattttttttttctgcacagggaagacaaaaagattagcagttttgtcaacagaaagagtctgagatagaaaggaattacttttttaaaaataaaattgaaaaataaaggccggcgaggccgaggacgcgggggaagcagaaaggtcacagcgcagggggcgctgttggaaagtgtgttggtaacttagggagagaagagagagagaagaaggaaagaggaaagtgaggggaggagaggctttataggaaatcctgggaggtccctgggggctcaaacggaaggtgcctgcccaaaagggaaggaacgatggacacaatgggcacaatggcacgtgtatcccccattgtattcacgttttaggaagtggcgactaccataaaaggactagtagcccagaaagcagcccagaaagggactagtagcaacctattgtcccccagggctgacgattgagcccattgagcccattgagcaccttcaatttagaatggctggagctaccgaaaagggactagtagactattcagccttaattttgatagccatgccaaggttccattgcttcaggctctaggttttcgtatttgtattcgtagatgccagcttggatcggtctcttcgttgtagaacttgcagataagtattaacctcacttgacacttgcactagagagcaactgagagatatgtacaatgctatatacattacaggtatctgtagtctgtctggtcaaaatgtcaggctttggggggcaggtgcatgtctcatgactctaggcttttgttttatattgcaggtacactgaggcttcttggctgtctaacctctcactttagatagcattatgatcacgagatctgatgttaactagctttcattttgccttcatggtatactggaattgtaactattcgtcgtcaagatggccatcgcattgatgtatccccgcgaggtgacatcgtcacctcatatcagaacaccaggctttggagagcattcccaactcactcaaaacgagttattaagcagtgcttgtcagatttcagtacgataacgcgccggttatccagcttaaataccatacgaatgttcgagagactttacaatcatgacggcctcactggtctgtctccgtcgtgcccaaaatcgtcgtcgatctgaaaacccctgctcctccctccacgagtcgaatcacaatcacattggaaagtcctatcctcccggggcctgcggggcccatatcaagcgagaatatgatgatatggatcgagatgcaacattgggggctgtcgagctcttcgtccgacacggcttagaagtccaaattcctaggctcgcaggactctactgtgaaatttgcatctcatcatatcaaaactacgacaagtgcaggcagcacacgaaaccgatatctaccatctcgaccgagacgacaccttcctacacattttcggagaaggtaggcaagactgaagcctccacacaccatcatcgagctaagcaaaagccccaaccgtctaaagaaccggctactgccacctacaggtcaaatgcttccgatctaccattacaaaccgagtataagtcgcaaatatgtttgccgaaacagcacaaccacagctaccccttatctgctcgggcaagcaagcatacgttccgcgaagactgagcggcgataggaaatggtttagaaaacgatgactatatttggatttgatacggtctgtggattgtcataatgattttgtatactgccgaccaacctccacatacagatgggagatcaccgtaaacttttatatatctgagtttgccaaggctttgtatgagcgttttcccttggaaagcctaaagtatgttattttactaccaccatccctaacaaatcccgggaggggcttgaatttccgtctaagtagtctcctttgccatttttgcggtgttcttggtactccagttggtaagttgtcgccgcctttgttttgtgacatctcataccggcgaagactggagtcaatataaccttcggttcgatattgaggatgtctgaaacctccagggctaccttgattcgcttgattaactctcaaatctatctagatgacagataacacctttcttttttgttggagtatttcctcctggtgctctagttgtgaggttttcaagtcggttcgaaacttgtttcgtttaaacaacgtagatcttattttatatgagaccctaggccaataagagaacggcattctctgatttcttaaatatgtgggaactgttaatttcggactctaaatcaacatctaaccctggtctggatcagatagacagtttgatatagccgatagaggaaataaagagcgatagtcaagttgctgacaagtattatgtctcttggcgatctatactcgaagaatataagttgacttaaggaacatccaagtagacaccgatgactaggatcacaacagtatcattggaatgtacgtacgcgttagtagcggattatcgtgctaataaatgttttaatgcaaacctttggtctttcattttttgtttcctctgatgttgggccttttttttttttctttattccctcggactttgtataccgaacttcaaatgtttttccaaattgccatgtacacttgaagcgaccaataaaaggcatgaatatatagtctcgctgacaagcttcaaactcaatccatggacccgataccgaagccacgtaagtgctatttttgggcgttttcaatcaaatgcgacacaactatgtaatgattggtggatagtgttccaagagtccaagagttgaacattgggaatgtgtcgaaaacatggccaataggatgatcatgtatagagaaaacacatcagattccaaatccgaggtatcgaggacttgtaatcttcagaagtctatttgttttttcttctttatatttttttctttcttgttctttctttcatctcccctctcttcatctgtctcgtttcatccgtgtgctagtctgtctagcatcgcaaggcatctacggttcccagctcgcggaggcttcctcctccaccatgcactgacccgctacttacgatccaaactgccttcgcacactacaattccccaatcttcctcaagctttcttctgcatttctattcacaatggggctctccaacgcagccatcattgtcatcgtcctcgtcgcctgtctcggagcaaccgcactgggagcatcgctcttcaagcactacaaacccgccgatggagagaccccgtggagtccaggctacgagcagaaggtctacatggccgaggtacgggctcgaggattcgaaaatctgaggcagatatactggggtggacgagatcttgagtcgcgttgtatgttctaatgatttctcgatctgctcatgtcgctgactttcattgttgattagatctcccagcggggccgagctactatcgtccccacaccacttacactgaagacaccaacacaaaatatacagcgagctcgtaacctctcctctctccttttctcgtcgcttttctcgaactttttacgaattacatggatatttgacggaacgaacacgggtgttacacgggggagaactggcgttacacggggttacatcgagtcacaacaatgatgggttcttctcaggaaacaaacactgagatgcgaatgagtttgcctggtttcacgggactaggcatatgctttgggggagtattctgattcggtcggccatggtggcttggacaattttttgtctcgaaattatggtttttttatggtatgggatggcccttggatctgcccgcgactcatctcgaaattattgccttgcagccgatttgcttgcatttgtatctgatattcacagtattgctctgatcgaatcaaagaaagtctatctttacaagacgaatccattgtgtgatctgaaaatcgctccgagctttggcttggaatatcgcgactaatcggagctttccaaagctatatatcctctcgaatccatggagacatggccagatcagtctcccgctccaatacggggtgaatcgcacagagccacacagtcaggtcaaggaggccccattcgccaatgggcccgctttcttgcgccctatgggattcaccatcgctatggttcatcgtcccccgggaacgttccagatagcggatatggtggacaggatatgattatgtgcggcccttgcggacaggcttcggtcgcgtttcaagcgtttggccaggctgttcaggccggtggttttcggcgtgtggtctttttttccgggggtatcgggcctttagatggttctttgccatcctgaccatctgttatactctccacacacaaccagggagccggaaggagtcacttttcatcatgtctgtgtggtctgtggtctctggtctttccgtacgtacgtaggatgttttgtctcgttctccatagtattttcaccaattccgccttggatttgggaggttaatggattctcttgcctgggatgtgttttccactgccctttcgctgctgctcgtattcgtatgatcatgcagatcctgacattggcgagtcttgggcctagctcacgaatggggaaaacggcaaatcaaaagagcgcgaaacttcccaactcctcggcttgagttcgcgaatctcgccataccatacaatattgggtaggaggggattggggtcaactccacacaacttatggtctgcattataaattatgctgcgcataactcggcttccgaacttccgtaagaagtcggaggaactcttgaccgtttttcggggatccaggtgcattttgtgattgttctatgaagtcatttacatttgagccgacatcagggggtggctatgggtgtccggagaagttgaggctgtgaattgccctgtcgggcgcacggatagaaaaaacgccgagaccgaacatcagaacggctttcggtgcacaaatcctatcgagatgcgtactccgtactccgtattctgtatagggtatggagtagcgaataattggaatgccttcaaaatatcactcgagcttggaacgatctcgcaaagggaattgtagatgcctagcctgtagagtttacggccagatttacactccgtctgtgtctcaaatgtcccaggcagccaagatattcgtctctccagatataaaccagccgtattcgcgctggtttcctgtttcgacggtcccaccctattgcccaggctcgtgcacattgacatggacagcggggaaggccaaggctggctagctacatgtatttatactagaggtttcctttgagtctttgtagctctcaactctcagctctttgcctttttatcatttttcttgcctgtgtttttctggacgttcaatctaaaaacgcaaatatggaatctcccgatactattccaaactatgatagcgatacaacaagcgaagaacggtacgtaagaatgcttcggagaagaaaaaagcatatattctttcgttacactggcaattatgtctaattcaaccccagaccatcgactcaacccgtcaacaccaaaatccaggccaagttccaaatagcccggccgccctcaaaatcaagccaacgacttcgacttagccccaaactactccttcaaattcaacaactacctccaaaccaccgaccagtgcctgtactggagatatggcagccaccattccgcaagtcaaaattgaccaaaggtctccctcaacgcccaaagctcggcacgagagatatctacgcaaccctcaatgagccatatgtcaccaataaacaggcaatgggacaaaaacatcccaaagaagaagatacaaaatcaaataatgtccaagaagaggatatcgtcgctgctatgtgccaaccgtcaagcagcatcagttctacatcctcaattcacttccgcgacacaaaatgcatctggcaatccagtaccaactcggcaggaactgagaaagggactttttacagattcatcattaaagaagaaagcacagccggctctgagcagccccggatgattatgcagtgggagaaacgggcactccctgcaaatggaaatggaaatgcggctccagataatgaacagttcattcttatggcgattgaccgcaagacacgccgaaagagtcgcattgctacgatgaatcggggcgggtttgatattttcataaggaagagttcgatcctggaccatcttcggacttgtatgacgttgacggtgcctgtttctgagagctctacggatttggagacttggttgtacactcttgtgttaactttgggtgtctcggtggcttctcaagaaggatggttgggttgattgttcttcatcgccggtggaaaacatgcatgtaccttagatattatggttacttgcgatacctttatgaaaagcactggggctactgatatttatactggattactgtcataaattgtgttgtagccataaatatacacccatttataggctaagtattgtcgaggccatcgccgaggtcatcgcaagcgcaagtccccatttatcagtaactaccaagtagtcaatccctcttccagcgctttgatctgcaatgccagtagacgcgagtagtatctgctaagagcgagattcccacccataaaccagaatccagggtgaccactccgccgccagatagtccgcatttcaccctctttatcaagtccccagatatcaccaaccctgtcagcaaccttgtcgccaaatatcacgcgagtctcggttctcatattctggtacccagtagcgaacacgatttcatcggcttcgagctctgagccatcctcaaaccggagtccatggggaagaacctggctaatttcctggccatgcttcacctttaccttcccatcgataatgagctggcttccaccgacatcaatatagtaaccgcctccgcgctggaagtacttcattaggagaccgctgtccgagggtccgctgtcaaccttgaagcctgccttttccaatccttgaatggtctttgcatcgttctggtttatgagcttggtgactttgacttgttgcgctttgaacagacgcgatggcatgctccacatatgaagatcggcgtcctcggttggtgggccgcttgcgtcatagagccctttgaaggcaatttccaaagtagattcagacgatatcacacaggtagagcttcgctgcaccatggtcacatcgtaccctttctcgacaaagtcctgggcgatatcgtttgccgagttacaagatccaatgacaatggcctttttcccctttgagtcggcattggcgccaggatgctccgagctgtgacacaaacgatctcccttgaaatcatccattcctttgaaaacaggcatgtttttcttgccagagtggccagtagcttggatgacgtgccgcgggtgcaaagtgcgcgtctcagttccgttttctgtcttgcgctcgagaacaaccgtccatctcttctcgttctcgtcccatgatgaagatttgatctcggtttgggtccaaacattaagctctctgaacttaacgtaggtttcgaagaaatccgctagcttatcctttggtgtatagacgggccagtcggccgggaaaggtaagtagggcatgtggtcgtaccacactggatcgtggagaacgagttggtggtatcgccgacgccagttgtctccgattctttcttctcggtcgacgacgagggtgtcgatctcgagcatcttgagacgcgccgcagcagtcaagccaccctggccagcaccttccctcctcaagtcagatcttatacttctagggaaaagcttcatcgacacataccaatgatcaataccacagggtcctttccctcaaagttaatctcatcaatacgtcgatctctccagttctttcggccttgctgctcgccgtgtcggacaccaaatggtctctccttgttctccttgtagccctttgattcaatcagggaagtgaagacggtgaaaatgtaccagttgccctcatgttccgccaatcttataataccatttccctgtccattttcggtagtgactttgatgtaaaattcgattccgaaaacatcaccaaagaaatcaataggagccttatgtggggatttcaagtcagacgatcggtcgatttcgattttgctgggcggtgcctcggtgacaaaggcagcgatagcttgactgccctcgagggtgtggaagtcccatgaatagcacaagtggtcacgccagtagcaattctcgagaaacagtgatgcaacggcggccttgtctctggctgagaggctcgagttcagctggttgatgattctatctgcaacagtattcgggtctaggggaacatccgactcagactccgacatagtctcagggaattcgccaggttcgatgttgcatgaacctggcacaactcgctcccgcgatggcggtaggtcattggattttgtcatgttgaatttggtgattgttgatttggtttgattcgatttagggtctgacaggaagtacaaagaagaggaatagcccctcacttcttatttcgcctgttgataccccgcatattgattgacaacacatacctagtatgtacagatctgctgaatgcggggctatagcgttttaccccggctatgccattcccggggtccccatctacaaccatctacaacagtctatttacttacttttctagtggcgcagagatctgactaatgttccctggctactgagcccttggtgttaaacttgttattttctttcgatccttctgttgtcgatatataaattccagttgctttaacattggaccaaaaggcctattgtagtacgaaaacctcgacttacattttacggtgggttatcctgatgtgggtacctagataggataaatcaacccttgacgtagtattttttatggttgttggccgtttttgtctatgaggcatgtttgcttgttgtctacagctagtcatttgaaatatatacaacccgagctctttccctggtaggcaatgctatacatcaataaattttctgttcgccaaattgttatttaaagctaccgagtaagtttctatctccgttaagcattgattttccaaagttttcggttttttagctaagaaattagattattgctttggctaacagctacgaattgggaagctttttgataagtatatgatacacagtagtgcagcgtaatatatcaactagcatcattggtctagtggtagaattcgtcgttgccatcgacgaggcccgtgttcgattcacggatgatgcacaaagatttccttttttttttctctttcaattattctgctcttgatcctgattgattgatttttattttgtaaacggcggacctgcgaatctctggtttatcgtatatgctccggggctgcctggcaacatagcaaacagtcaataccaaccagcgcacactacttctcaaccgagaacccccgagagaccgtcgtgagaaaattaccatcatcaagcagggaattggtatcctctacgagaagaaattcattttaattggttctcagtcatgaaagtaatgggctccatctctctggaccccaatgacagatgtctgcggccgcaattacagtcctgtatacaaccgaagcgagcatagacgataacaactagaactcgcattgcaccctacgaactggtgcagcgcccattgtgagcctcccatacagatccgacttccccggcattgactaggccggatggattggctttgatgggacctgatctatcgttgacaaccagtacaactttgcgccagtgccaagctcagcaatgctcgcgatcatcgggtcgtctggatggacagattacgagcaagtcgggtgtggttggccgggcgtcttgcttccaataccttgactaggtatacagccgcgattgacagcaacagcggaaaggccacggctttgaagtcagaggcgcattatggtggtataaaagtaaaaaagtcttatcacctgtcactttttgtgaggtcgctacacggtagagactactgttatcgcttctgatgatgactgaagagtggattggccggtttgtatggaggctatggtggtggtttcaagaacgtccagatgagcagtctggcttgagcgaactgtggtcttaattgatctatgcgacaatcggaacggggccctgtttaaatactatctcaggtccatacaggcccagaactcgacgtgattcacattttggacaatctacccgaggcaatttcccgtttgtagcagagtggagcatgagaagtcttacattcttcaactatttgaacaaatccatatcagatagttcagctatatgaagtattccccttggaattggaatattcaggcttaacactagaaagacagataaatatagactggacagtgcaggaggacaaagcgtatacgactcggaactttgaaacgtctcggaatttcgaaacgtctcaaacggcacatcgcgaaatcctcaaattaaattccattcttcgtacgagacctgagttccttccagccccctccagtgttcggaatgcggggaacctttcgtcactcccttgacaccttcctcccttgatgattttgtcggtcacccacgttgaccatatctttcctgtaccgtttatgtcgatgtgattacaacgtggaatcatcatgagtcgggcccggcgtcatgttctaggcgcttgcctcggggctttcctattgctcctgctctatcgttatcaccgcaacaacgatgcacccaaagtcaccctgaatgttgaaatcaacccgaactatctatggagaaaactaccagtgcgatacccggttgctgaattgcatccactacctgttacactgccccagacgctccccaaggttcaaccggcagactccgaagtctctcgtctcaaaatcgaccgccaaacaaccagacagtcggtcgtgaaagaagcctttgaacgatgttggaagtcatatcagtcacttgcttggggcgcagatgagcttgcgcctctcagcggtggccctaaaaataaattggggggttggagtgctacgataattgacaaccttgacacactgtggattatggggatgcacgatgagttcaaaaaggccgtggctgtggtcacggatatcaagtttgaaaatacacagtcgcctgaaattaatacccatcaagtcaacatccatttactcggaggcctgctagcggcatttgatctcagcgctgatcggaaattgctgaaaaagtccatcgagctgggcgatatgctttacgctgcctttgataccccgaacagaatgcccatcatccattggaatgtgcaaaaagctgctcgccgagaggagcagcttgcagagggaagtgcactcgatccagaaataggctccttcacattggaattcacaaggctgtctcagatcaccggtgacccgaaatactacgacgcggcccaacgcgtcatggaattatttgacaagcaacaagacgccaccaagctcgcaggtatgtggcctgtcagtgtgaatgctagtgaagaacttcttgacgacgatttcttcacattgggcgccgaagcaagctctctgtacatgtcgctacctcgggcatacgctttgctaggaggccaagtacccatgtatcgtaagatgtacgagaatgctacgcgcacggtcgcgggctatactttatttcgaccgatgaaccccgagggcaaggacgtgctcatttctggcactgtccaagtagccatgacagagaatgggaatgaacaaacacacctagagccgcaaatgcagtaccaatcttgttttgcagggggtatgtttgcactaggaggcgctttactcaacatccctacgcaccaagaaaccgcccataggctggtcgatggatgcatctgggctcatcgggtcataccgctggggataatgcctgaagcctttgatgtggttccatgtgcgtcgcaaaagaactgcccatggaacgagtggcactggaagcaggaggtctggaaaaaggcgaacagcctcgaagccgaaccaaatccaaatctcaacgtcgatactttcattaaagaccaccatctacccaagggattcgttgggatcccggatactgcttataacttgcgctcagaagcgatcgagagcatgtttactctctaccgcatcagtggtcgcgaggatctactcgatgcagcttgggatatgttccaggcaatgcaaagtgcgacgcagacgaagaatgggaatgcagcgatcgttgctgtcacggatgagggtagtgaactgaccctcaaagactcaatggacagcatttggatgtcgcagacactcaaatatttctatctcatgttcagctctccagacctgattagtttggatgagtttgttttcaatgctggagggcacccactgaaacgtcccgaggcatcatgacaagaagtgcatttgttttctaccaccatccctctttttatttttaattatatggttggaagaactgatgactagaatatctataattgtaccatagtgtttattgtatataaagcaagggttatggttcattaagcccggattctctgttctctttaccaatgaaattgaccgagggaactcagtcagataggcaaattttctatatcgaatatatcaaccatttgtaacttctcacaacgaatatacaggtcgtgagtgtaaatcccatggttcgtcgccctctgcagcccactcctcctgggtcttcattcccttcaaagggatccccgtccgttcggcatactctcggagaacatacaagacgctctcgtccccggaatgtagtgcccaagagtatggcgagtgcccatatttatcgtgggggtttggatcgactcctttaacagtaagcaacagcgcaaccttgtattcatccctgcgaattgccgctaatgccaatggagtaatccctttatcatctctggcattgacatcaacaccggcagcaagaagaatctttatcgatgccatacttccatgtctgacggcaaataacaaagccgtctggtggttattgccgaggatcggccgatctagctcggatttgttcaggacaaccattagcatgatgacgcgcgcacctgcagtttggattgcgtgcatgaggggcgtaaggccgcggtgatccgggctgtttgcattgaaacccggtatggagagcagtagcctgaccgcttcttcatcgtttctgattaccgcctatattagtggcgacatgccctcatgatcgggaatttctggatcaatccctttggcggcgagcagtatcctcattatatcgactcgtttggacatcaccgcctgaatgagtggagtcctgccttggtagatgggctgcggatcgacaccgtcgtgagcgacaagcagccggagagttctcaaactccccgctgtaaccgccagccccaacggtgtgaggccgtagtagcccttgcagttcgggttgacactaggcatagcaagaaggagtctagctatccggtcatgatcgaactcggctgccacatgcagtacggtgtcaccgttgtactttgccatgggattggcacctgcttgcagtgcatttcgacaaacactttctcggttgagtcttgcagcgaagtataaggcatcgctctggggtcgtgccgcatcgaatcgaaaaaggtatggaatgagtagtttgtgtagggtggtccttgttcgagcaagtgcaaatatatcccccgatgattcgagcttatctgctactgctagtagcagttcgttgggtagttcggacagaatcaattcaatttgggtgacgacgaatcgtgccactacgaaaatgggtctttccggatcaccactagttaactgactatgatcaccgccttagtttgggtttaggaggcttggcatacgtctctatccgcagaacacgcgcttctcattggctgtgcacttgctatttgcttttctctcttgctttctgttggaagtcctcgttatcatctataaacaggcatttcaatttgacgaaattcgtgcagcgtaatttaccactagaccataacaaaaatcaaggttcttgtttagggcctagaggggccatatcccattcttgatacaattctatacctgcatggtgtattttgactttttactatgcgaccgcgtctttttgttcgcgtctactccgtacttcgcttttccttcgcgcttacttcgctctcgtacttctatgttttcttttacttcttttatttcatgactcttattgctatcactttataactcttttgcttcatgtcgcctgtggcctatgtaatccttctaattcgcgctgccgccgacggaccgctgcagcattctggctcatcttccacaacagttccttttttatctcctcccggtgtttcccaatttcttcctcggtttctactttcatctgtcaagtatcagtctctatcctcatatggtctgactatatacgtacgaggtatccatcttcagtactaaactcgcaaccaatacagcgtcctggcccgatatattccactttattgaagaggcgtgtgacgtgttttaggatagttttacacccatgacatagaaaggtataatcttggcggcgtggtggtcttggagattcagacgccatgttgtagtattcgataatagagatggggttgaagtgagggtttagacgtgagtatctgcgtgatcatataccgtgtgcatatatatctaccccagggattagagttactccgttccgtgcattgacatgtcatatttcacaacgccgtgccgacccatgttgttgtacgaagtacttatttctcccctgactttccctgccttgctatctatagcagaatatggcagaattctatattgcacccgattggaaggcggtacaggatattcaggcagccgtgaactctgggcgggaagcctcaggtgtctaaacctactgagcccctgattgtaatcacatgccctaaaatatatacaatatgttcgaaagtggtgatatatactatttgatgggcgctgtccacagtaggacttcggcttattagtttaaataggagcttggcatggggtcgatgcattgtggggcagtgacacacagtgacacacagtgacggatattgactcgtgaattcagaaagataaaatgaatgagattggtctgaaatatcagacaccaaacagatattccatgcacatacaacatgaccaccatcgagtccacaaggttgcgaccagccagccagctaacaccgacatcaacacccttgtccatccttgacgcaacagtcgtgcgctttgctccaacaggagcaatctggatttttaaccaatctgcagacctagatcagaagaccctggttgaccgcttgcgaacttccttcattgaaaccctttcaaaattccctcaatgggcaggccaactccaatgggcacccgtcaaccccaaaggagaccacacagaacgtttcaaccgtccattgattgtatacgggactgataccgacccaggtgtcgaatggacagtaattgagcgccccttccgagcagacgaaatcgtccccacagcgggggaacgggcttcatcgaccaccggctctcaacccggagtatgggtaggcgatgacttcgacgaaagacttttcatatcatccaacccactggcattggccaacctgcgcgactatgccggtctgccagggatgcaagtccaaatcactctcctccaggaaggaggctacgtgatcggaatcaaaatggcgcactgtctagcggacgcacagactttaatggtattcgtgcatctatgggcgcataacagcaaaaagcaatttggaaatcagcccgaatctccgctaatgggcgagcccgtgttcgatccgacgttgctggacaactgcgccgcgggcgatattgatagccccgagccagaccaaaccctcgtacacaccgcgcgcaaattgcccttgcatcggtatagctggtgggataccagcgacgagggctacccggcatttttgataccaacgacagagaactccaaacccgcagaaatcgactacaaacaagtctcgccctccgagccagcaccctggggctcgtgggatttctccaaagaagtcaggtacacacagttgcactttacaggtgcggagctaagcaaattccaagccgcagccctcgacacaggcagtcgaggtgacatctctcgactggacgctctactcgcgcacctgtggatagccattacacgagcacgcggacaagccaactcgtcaagacccatatacatggatttgagcctcggcacacggccgcgtgtttcccccgctcttcctgatacgttcatcggatcgccgttgttcctgacccatgttggtggaaccgcttcctcgatatgtcaggaaatattaggcgagacggctagtcggatccgagagaccatgaagcggtttacggctgatgctgtgggtgcgatgttgcatgatgctgcgcacgaggtgtcgccccagcggctgtggcaggggtttttggggcctgagcatacgcttgttacgtcgtggttgcggctgcaggtgtatgaggttgactttgtgggtggggataagccacgttatgtgcacgctgttatgcctaagatggacgggtgtcttcaggtgatggatagtggggttcatgatggcggggtggatgttgcgctctatcttgacgcggtggctacggggcggttgcttgatggtgactgctttcgagtatgaatttcgatgcttttataagtccattctagtggacgaacagcaactattggtttatatccacgtaaccgcgtaaccgggactaccaaaaaaaaaaataaaaggaatcaaaatttatacagaagaattaattataaatgaaaagcaatacctaagcactcattgaaagcgcccgatgccgtgatgtccgtttccgacaatcagcatctcgactcttgcgccccattcggccaagagacatgctctcaagagtctcgggcttaccaccccaaagcttagttctgccattccgtttttgttgtataggtggaatccagaagtgcgtgactgctgcgccgatgatcatgcaggcgctgaaaacaaggagaacaatgccgtgcttgcgggtcgatgcgttacccggccctgcgccgaagtgataatatgctgagaagatttgtacgagaatagaacccagctttccagccccagcgctgataccgtgacaggttgcgcggtatcgggttgggaagatctcggcggggatcatataggttgttgcattggggcctgtgggtagttggttagaatgatttagtgcatcgtaacccaggtttgacttaccaaagttgaacatgatttggccaacgatgtacaatgccaccacagcaggagggtgggagtaaagacagacgaacatggttcccagggcgataaacagagccgctagtgcgaggaacatgtacttttgcagtgccacgcgatccagtttatgggcaaagacaatgagcagtaggccaccgacaaaacttccgatgttgagcacaatcagcccgcgcacagaggtttccatgaacatcgtgtagatatcggcgtctggtgaatcgtctgtcatccagctcggtgccgccgcggagatatgaagctggccccacgtctttgctaagaattgagggctcgacaatccgataccgtagaagccgaaatcaaggaggagccacgcgagagagcaaccagccaagctgcgccagttcccttctgtccagaagtaccgcatgatgtcgctccgtgccaaccgccagtgagagttgagggtagcggggggtaagcgggtgaactcgtcatcatcttcatcgttatcgaaagtcgaacggctagcaatggacgaaatcggaggtagttgaattgcgctaccggcactgcatgtcgcagtgtttccccagcccacagaatcaatcataccgggcgtgtcactgaaaagggtggttgcatcaaactccgccgtgacgggatcgtccacgatatcgactaggtagcgagggctctctgggatggcgaaccggaaaagagtagcgactgcgccgggcacgactccgatggcgatcacccagcgccacattatatcgacagtgcgggtgatgtcttcacccggagtgctattagcacgagccactgcgataacaaccagtgagacgatgttgcctgcaatctgaccgagtggctgcatgaagaagacggtagccatcatgcgggcgcgatgcttggtgggggcaaatctgatatttcaagggtcagtttttccacgattaaagatttcgagatcgatcgacatactcagacgtaatcactgcgctgagtggataatctgcgcctactccaataccgacacagattctccaccaaataagccatgcaaagacgttcatgcttccgtccacgcctgtcgaagacatgaccacacctagggtggctgtaatgaggagtaccaattcaacaccgtacatcttcttgcgcccgttcttgtcggcaagaaatccaaatgccacttgccctagcagggttcccccaagtgttgcgatattgatgcatgtgagtcgtaacgaggaagtgttgtctctccagtatacgtaggagatcatcggtaaagccatgttactggcaaatagctgtatcgagtattagcggttgccgtttatgcgttgcgacaacatttcaatctgctctgaaacagggggctcacgcactgtgtaaccatcgaggaagaacccaagaccggcgaccagcacgacaatccattgaaagccttgcctgtcgatagtctcgtagatctgtcgcatacggacatatcgatcctaaaaccgaactattaggaacctgcatcatgcatgtcatgctgttcggacattccatacctgctcatggtcgaagtccctggcacggtcggttttatacaaccgggcgtggaacttgcccattgtgaatattagaaggttgaaagatggttaaagacttaaagtcctacattttcgcagaagatcagaagatgcttagattatacccggggcttccaaggtttacaaacgaaatacagacggaggcccgtgatccctgcaggcgctaatgcggggctaagctgcgagcaagacaaagctttagggttgttccccccacgtgcggcgtctcttgagcttgacttgtccgtggccaccacgacggatccacatgcaacggccagcccacgaggactcccttgagacatggcgaatttagattagatggttcttgtattattaccaattgagccatttattctaattaatcacttattgttgcattcgattattcatttctttcattatatttcattatattccagacgcaattctagtctcaaaaggtatatgcaacgcccaggggtatcttggtattatgtgatacatatcggcccctctgcccaggaactccaactccatgtaaaatccatagcaattgagggatttatatccgtcctcgtgaacgcttcatccaatcgtcaggtcgtatgacaacatctgacaaaatgctgcgcagtctgggaaagagagaggaataagcgaatagtccgaaatgaaagaaactcaaatgtgcactgaccatcatcgtcaagaaactgaatcgtaagattccgcatttgacacagaatctcgaagttcggattcagatccagtagggctggccgcccggcctttttcgggggtttaattgagccgatacagttcactagtcgggctgttagcaaggtcgctgtggccggatcgaaccgaaactcacggggtatggaaacgtatcgtttgagctccctccgttgcgagttagcgaagaatagcattacacgcttcccattgtgcccgcggaggatgcgaagattttggctgatgcactcttcgccccggcctttagacttggcctcggccatccccccgataaagatcaacttggagcagagcagaagttcttgaaaccgtacgcaatctgcgaatgtaagcggatgttcatcctccaaggtttctcggtcgcgtaccatcccaatgatcgaatttatatgatagctgcgtcatgaataccgtgcttcccgtttggaccgtttgctggtccataaaggacacgcgaagagggtaatcgtcgcctgattttggatgctctaggtgggggaccggcagttttgtattggagactatgatttgaatgatcagcatgtttatctttcggagacatgcgacacaactcacagccatggataaaaggtgtttgctggcctaatcctcctccgagttcaagacatctcaatgcgcccgttgagtccttgcaaatatcaatgaatttgtatttcagcttgaatagttggccgtttttgacaaatgaactgcgaacaagtcagcgcattcccaccggagggagccatgttctcgacacaaacatttgcacagaaggagtcagctcgagccgcacgacttcatcgtagaactgccaggattgcttcctcgagctggaccctggggatgtcgcaggactcggaaagaggatactcgttgacgcggacgacacggtggaggcggaatgggagctttggcgtcgatctacccactcctggcaatctcgaggagcaaaagggttcattctctcgttctatacaagggataggtaatgttgaagatacgatcgggcggatcccgtctgaaaaagatcggccaggaacacaagtggcataattgacgatagaattatatgtagaaaaagtaaatatacactcgaacctatgatatccagaaaccgaaaatacgtcggggatgagcgtaacataatgtggagaggggatgtggaacgtgctaaaatggctggctatcagatcacgacgggtcccacttgcatcgtgctttcccatgtggctttgttaaatttcattgggacgttcagctgtttgagcttgaatgatatcagtattacggaggacattatccgagctaccgttggtataattgcatttttacctctattagccaggaccgatgcgcttaaatattcccgaggttactccgtctatatctacaccttggaagctaggctaaatgatccacaaacacccagaatacttctggaactggtctggaaattcttaccgatcagcatcccatggttatagttccgatgcctgcagcttcccgatgcgggtcgcataaactcggctttatagtagagccaaggtgccaatcaatgccgaggctcatgaagtataattgatcttgggcatccagtcacactcttcagaccctgcacaaatcggtactaaaacacgtaatagctctttccgccggagttatagctcgaaactaggctttcaatttccctttttagctctcggacccagtgccatatcgacatgcctcgatcaactatcgttttttagcccaatcagcgggcctagtgtgaagtatgttcgggactcgttagccgcatttgcagacataaatagtcttcagattagtagagctatatttgttattttatactaatatgctcccgcaattagtacacgtcacagagggtatgattgagtaaacctccaatgatagaggcgatttgatacagcatagaaagccacataactaccttggccactaccacgagtgatatttgtaagatactcgtccaatacacactgttagttagagatctgtttgcattgcctaaacagtgatcttcccagggataattgccgacctgactgccattgacaagttacataggaaaagccgcgacctgcagattcgttgttcgaactcgataaccagagaatccgacacgcagtcgtgctaggaccctcgctcagcatcggcccattgttaaatgagctggagcataagatatattagaattggcccatacgaaaatgaactagataaattgaacggaagatggctctgtttgtcagtggagattaatagtcccgcatttttgatttcaggatcgaatctgtccagattggaggtggcatgggaagacgtcacattcctctctacagcgcggagaagagttttgcctaccacttagggttatattgttcgcaactatagtcagactatgttagaaatgaatgttaactactaacgacttatctaagattcatcttacttctctctaaattgtacccgaattgtaaatttggctgtcattatcttgtcttagaagggtcagcttttgtccttcggagctcttagagtcgtctatcagggctgaatgtaacttcactgacttaataatcatagacctctaacttgaatcaattacactagcctgtgatgtaggtgggctacatataaaagcgaacttgacagcaggcatcaacctttccttgtcatcatccatcaagcttctgatccaacacagcatgtatctcaatcgtccaacctatctttggcaacttatttacatctactcgtacagctaacaattttctaacaccccagacatatccttttgacattcaatctacgtcttatctttactccgtcatacacaagacgaaatcccctgaactgatgacaaaatcaagaccaattcacgcaaaaatacacttagcgaagtcaaaatgttcgtccccgacgcagaagatccaggatctagatttcagggcgagccttacttcaacatggctccagtcgctccagctccagctcagttcggtcttgggtacttcggtcctccgtccgttgaccctagtcctgttgcttacggtccttgcaaaccgccgccaatttaccctgttttacttgggccctctcttctatcccaaataatcgaaccctcttctgaatcagcctcccgaatggtggatggctggccggtgtttcatccgcagtttggatattacctcggtcttcgaccaattgacttacagtcatttgtccctgcttcatttccctatctcccttctccctcctatggtgagtgcctttttctctcgctctcaatgccttgccttcctttgaacattacttatactaacctgaactcagcttccttccctggcgaacctgttgagatcccggggaacaaatccggcgagtgccttgctgctcatcgcaaattcatgaactggatccatacggtgtactattcatcaaagtcgcccgaaacctttgtgcaagcatggcaacgagccctcaaagatatgaagcaggcctttggacccccatatcttcccacgatcttcatcctcaatcaattccttgctgcggtcagtgtaaatcctgacaccattccatgggttgagtcgctccactttgagaaaggttctctgccagcatccatactagatgaagccttcgccgatttcttggagtttgaggcataccgactaggaaaccaacagtcgcccttaagtaacctaggtactgacgtcgctaacgtgtatcaaattgaaaatctcgccaagcattactgtccctttcacctgcgtctcacaatgcatcccattgaggaatgttttcgaaacccacagaacacgaagcgtaggagaaagtggaggcggaagcaggcacggatggcagcagctcttgaggccgaaaatggaggcggctatgattgacatgttctgttggagaggttaccggccatcaggtgagatttaatttctagtgtccttgtcgtgaagaggctacggctctttgttttaatgagtgggatctgtgttcagtcttttattctttcatttctcatgtccactgttgacattttcctaccaagatgccctctccttccgttgcagatgttttgaacatcaccaactttcacacccatgaatgcctgaaggatcggctacagcagccagattaattacttcttgcacctttccctttttcttttctgtcatttactttgcaattgatttatgaaaattttctccattccaaaattgctattttatctctggtgtagtttgcatcatcctatccaccatgcctgctataatatgtatgcgctgttctatatatcctactcttaacatagcttttaccatccatctcttcggttcactatattccttccgtgtatttcatcattgtctgtctaccatctattcctcacgttatcatatttcttctatcatctctccctgtcctattcttctaagatttctcctcccttcaccatttatacatatctgttcacgtcttatccccctttgttgatagagctatagaacgagaatgcttccatcaattggtaagatggccgagttggtctaaggcgccaggttaaggtttaccttgactccacaactagtaatagtttcctggtctcgcaagaggcgtgggttcaaatcccactcttatcataactttttgctttttgttcatatcgattgctttttgatctagttggtgaagttttatagtcaaaatttgtgtggtttggtcggttagttcggttaagaaattttctttattgtgcgtctagtatgatacgtcggcaatataaaaccaaacttacttattaagatggcatattaattcagctataggaaagctaactgcatcttatatgttagatctagaagaaaaatctctagaacaacaactgtatactatctcgggtatgacacttgcatggcatattgtgaaagactaagtcaatataaatcgttcaatcttaattgcttagggtagtcctttccatacatttttgcttcttagatacataaggtgtaataaggtcaggtgaacactttcagaaatgacagggatttccgtcaatacaagtcccttaagctggaccagatactagcttacctgatccagtaggtttggataagtccttagcgacacctcgaaaatgtggagctagatttttgggcattaagaaggtagatagaactagcctgcatgttgatctaggttataaatgagggatacatcgatgaaaacgtgtcttgtttcgttaaaccttcgagcacctagaacatagaccgtattcgataacgaagaaatccagaaagctgagagaaaatgtattcctaggcgtagaaagaagaacatgtcccatcatcccgcaatcaagttgcagcgaccgtagattatgggattgagaaagaagaacagtcacaaatgcatatatgtcacctgttccgacatagatccacttctctgacagggaaactgtctctgtgatatctttcacagcggttacctaatccggtaatacaactgactgtcactagaaatgagagctaatcgagtctccatctatttgacatctactcgtcttcctgatccgctgctggatacagtaatttcgaggagatcatgctcacgtggtggacgttcgtgaatgacacgccatggcccgcttgaggggagcgggtctgtcaatatcgacttggcaatataatgagctctccggggagtgaatttcctcattttgatctggtgaaagtgtgtaagaagatgttccaggaatggcgaatagttgacagaatcatattcatgcaaatcaaacaataggatcattagaaagtacagatatattctggttttttctgcagagttggggacccggggcgaagacgtcacttggcccctgcagatctgaggatattgtgggcgaaataccgctatccatggattttaccactttatgccacgatttgatgaattaaaagagggataatcaataatgggagacttaaatcgtactttacataacaataaccaatgtgattgtgttcaaaggccctctaggaaggcttatatgcatctcaacccaaccacccggatgtcggatacgaacttaacaccgcgatctaaatataggaagcagaaaaaactggggataattggaaagcacgacagtcaatcaattacaacagcccatcccatgtgtatgattcaacgatcgctaccaaatgtatcatcccaccttgaatatactaattttggcccgtttgtcctgtaagatttgctctactcagccttgggttgaggctgaacaaacagtctgacctcatctatctgcgttggagactagtctattcctggagtcgtatataaagaccagctaactaatgatttgatgcgctatgttttacgaagtagacgctgatctctcgtcaccactttggcttaagaaatatcatgggcccgtgtgagacagccagtacaccgcatgtcctcaacccttaaaacatcaccaataatatagaggactggtttgaaatcaagtctgaatgcgttgacatcaagtgagacccagtcaggttgcttatttcaatacctatgcaagggagatttccagtttagtttcccgattgaccttagcgtcaggctgtccgtggcttccgtgaactaactatgggatatatttgaaacttgcacagactcggccaatcaacgtctttgatacttttagaattccaggggtggctactcgggctggcccttcacccagattccgagcacataaataccccagaatcatcgcattttctacagtaactctccatacaatagaacatcttataccatctgatcatcttaccagcaaattctatatctccttcaaaatgaagtccttcttctccgttactctcttcatcgccgcggccattgctcagagtgccaccatcggactccccactgagaaccaggagatcaatcccggcacggaagtcgtcgtccaagtgcagcgtcctgtaagttccagagtgacctcatcacagaaatccgttttactaattgatcatccagaactctctaagtgggtccacggaggtgggcatagcgatcggcctctcctcgtgtgcatccgcaccttgcaggagcgcagaggatattcttggaacaattctatacaacgggcctttcagccccgtgtaccacgagaccaacctgcccccgtatgagaacttcacgatcaccgtgccggcttcggctaccgttggcaaaagccagattaatgtcgcccatgcggctctgattggtgtaagtagatctcctacattcaaaggaattcaagcatgctaattgaattgcaggccggtccttccgcgttcttggagtctttcaaccagactgtcttcgttgtctagattggtgccagcttcgtacatatgtcttttcattcttgttgtaaatcgcattttgttgtgaatatgccttgagtggatttgttgatatatttgaatacagttcagtttcgcaaataaatttggttatacatctatacctccaacaatacgctcgaatgaaagatatgaaccgttctttaatgtacaggagaatatgagcagcagacgcctttgaaagtggcgttgcccgggtctcgagggtttctttgtttaggaccaaccatttttcattagtctttcctattgaactcttcattcggacatagcctctattcaatactcaacctataactggtttgattcttctgagtcttattgatacctggaccgggccatctataaaatccgcctgttcatctactctttgtcccgattctgacatgaataagactacaacaagtctcaataaacatcatgtgcaccactgggattctccctcggaaatgagagctttctcttgtcttcgatcccacggaaaatccgcacatcgtcactcgttaattctgtcatgatggacaaggtcttctctcgcgactacaaccccatccccaaagcagatgccgatggggacagcgatgtcaccatcacgaacagaccgccccgccggggcctacaacaatttttgaaacgaaacctcgccgcaataaccataaccggcctgctgatggtcctgttactcctggtgatcgtcgtaatcacagccatcgccgtggaacccttccgcaaggtcattgtcctaaaacggccaccctctgactcgctcgcataccccgaatcactcgaaggccagcgacagtgcctgccaccagctccacgagtacgatactcatgcggcaactcaaccaaggaggccgaagcgctcggctgtgcctacgaccctcttgctggctgctggctgcacaaagaatgtccgcatgacttcacgcacgagtttgcgcatttcaacaatggaaagccctttgtatatttctatgacgaggctgccacacagcaaatgaaggattacaccgaactcggcaataacccggacttctactggactgctgtccgtgagcatctggtccattgtctgtatctccttcgtcgaggccacgatgtccacatgcgtgggggtcgtctggacaatatgcttggggatctagagcatgtcgatcattgtaccaacatgttggctaattggctgcggagaccggatcccgctttggaggagataggcacgcagggccagactcattgcttcatgtcctgtgcttgattattgggtatatatatagtcatggatcatgggatcaaataagacggatataggcgccagtaatcccgtgtcttggacagatggtgttgaactttgtattgttttactaaaagtccagaatgacagtggctttccagtgtttcccactattatgttatatatcttgatccaaaaagaagaaacagacatagtctattctgatttattccaacaatacttgaaggtaaaaataaatataggaaattcaagctttccgggtatctaatctccgacttgacttccgttatgtccgcaaccgtgaaaataggcctccacgaaattataggctcctacgaaactataggctccaacttcttttataacaatcatccaactcgcacctatctcccagaagctcctattcacatactcaaaatgcctcccaaacgtgtcgcgatagtcaccagcagcacccgcagcccccggctcaaccccacgataacgcagtacgtctatgacgtcctcatctccgacccgacaatcccaacaaaccacagcaaagcaaccgacacagacccgcgccacataaccttcgaaatcctcgacctggcaaagcagtcgctacccctctacgacgaatccgtcatccccgccggcctgcccgccgaagaccccaccccgcactacagcaaagcgcacacgcgggcgtggtccgcggtggtgcgccagtacgatgcttttatcttcgtcacgccgcagtataactggagtatccctgcgagtctgaagaacgcgctcgattatctctacttcgagtggaaggggaagccggcggggattgtttcgtatggagggcggggtggtgggaaggcggcggatcatctgcgtggtatcttgaccggcttgcacatgagggtggttggcacggcgcctgcattgccggtcaagtttactgggtttcctgttgggacgttgtcggaggaggaagagaaggtggagctagatgagagggatcttgttggatggagggaagctggggttgaggggatgatgcgaaacttgggaatggaattggtttgtgaattggataaggagtgatctagtcttcagcagatagcatggcaggttcttcctggtccgatgtgatggaacttatgatttagtgaaagaaatcgacctagtacgagtacgtatactccttaatagtagatttagcaatacactcggcgctccgcaagttattgagagactaaacggtagtatacggatttataaacctagaattccccttgaagttactattactaatagcgaacgcctcgatacagccggttacgcttccctccttattaagataggagactagaccggccggataaaggcgtagattcttaattcagagtacgacctcatcctcggccttgacttcgagatatcgaccttggagtctcgaccacgcatgaacctcgcagtgtagtcagataaatctcaaatataaatgcccatggggtctgcaccactggccagaagcatccgaacttttccggtgattaacgcgaatagcagccgtgagtggagattcgtaggtgcccatattgttcccactgacgttggcattaggagaacaccccgctagttcacgaagtgttctcttgtggtaatccaaaatagcatggaggacggctggattggagttaccagcagccctaatggccgcagactcctcaatgccccaggctacatcttctctggtgagtttatatggcatggtatggttgtgatccttaccttcttactactttggtccagtaggcaatgaaaccttctatgatcaattatgtgaggaaaaagtaagtcaacaagacaacacaaaacagtccaaaggcggtctgcacaccataatctttagcaaagtcctgcaaacgaatgcacccatgagtgagagaagatatagaactattcaccgcccacttttgcttcgggatatctatagtccgtgatcgtcaccaaccctttgattgctcttgccttgaagccactggggaaatataaatacctggtcctccccccagattggttctcttttttctttcttcttcatcctagtgcaagggctttacacgtatcagtgaggagacatccgagatcgtgtttttgctagttgaaaactaccaccttgactgcttcaagtgagcctcgcggcttgcttgggaatttttgaaacatacttactctacctcaactccttgactcttgagtcctcgagttgaattcctttgaatttgatgccatgatagatatttggactcagtcttgagttctgagtgtgcgatcacatgccatcacattaagatctttgttttgtttgctcgtttgcttgctcgcttcccgtttgcattgtttactagtttgctttcattgattgtttgtcaggtatctcagcgagaggtttggggtttgcaacgtttgtaaagtgagctgtatcaacaggctgcttcccactttgcacctgcttctttccctctccatcttagtttctgaattgattgcactctttcctacttgagaagacctagcatgtcacagtcttcacgtagagcttggtatttgcataggtagttgccataactaccggtttatttcacatgatccttccttccttctttccctatctatactccgtcccttccctcctcatctgataggtactgaattcgaaggatagtatgtattaaagtcacattagatgtgcctttgtaaggtatgtaactagaatgtatggagattatgtacttttggatcgtcaatcatctcagtcagtactgagaatgtcctcgcgcgtgataccactgcgttcacacatggcccggaagatgccatctgccttatcccacagcgcaactggtgcatccatctcagcgatccgacccttatccataacgcagatgcgatcgtagtggatgatcgtgcgcaagcgatgcgcaatacacagcaaagtcttcccctcgaagccctgagccatagtgtactggatcttctgatcggtctcgaagtccacggaagaggtcgcttcgtcgcagacgatgatacgtgcgtcgcggaccagtgcccgggccagcgccatcaattgccgctggcctagggaaaagttcagaccttcgtcgtcgacaggtgattcgagagtgagtttgtttgtcgggcgcgctttcacgtcactgtctgtgactggggttgtagttccgctggctagcccacttggcagtttctcgtcttcggattcttgctcttgttcaatgaggtacgccttgcgcagcgcggaccatagttcgaggtcatcgtgctcgttgaacggatcaaggttcgagcggatcgtgcccttgaataaggctgggtcttgggggatgatggcaaggcgggatcgaaggtcgtggaggccgacggtggaaatgtcgatgccgtcaattttgacgctacctcctgatagttcagttaaacggaatagtgcggacatgatactcgatttgccggcaccggtgcgaccgacaataccaatgcgctcgcctccccgcacatccatggtgaggccctgcaggacgagtggaagctcagcccggtagcgcatctccacgctgttgaactcgatgtggcccttgtcaggccagctggctggcacctcggcctgatgcaaaggcgcctcctcttccaattcagtaccgtagaagtgaacccgctctgtggcgttcatgttgttctcaacctcggccaactgacggactgtgaattgaagcatctgtgcgatagccaagatataagacagcaccaacccagaaatgctgggggacacgttgaaccgagaagtgacgaccagaacaccgaccacgaagaccaatacggtcgccacagcatcgagtcggacactaagccaacgttgattggagaaagtgaggaaataggccccgttcatcacatcgatcgagtctcggatggtgcggcggaattggttctctacgccatatgctcgaatgcacgcgattccggtgatggcttcgccgaacttggcatacaccattgagcgcaagacgctctcgtggcgcttcatctcgcgggcggatgctctgtaatagttcgaagctagaaggaacagtatgaatagcgggacaagtgcgatgacgaactaaaggagttagcaaagatcaaaataccaagaaaattccaagagagagggtactcacataatagaagaacactatgaccaagaccatcacggagataatcatagtcatggtcagggcatagatacgcatcgcatcggaaagttcattgtccatcacctgaatatccttcgagaagcggttggtgattcgtccaagtggtgtagtatcgaagaaagccataggcgcgcggagaacacgagacatcgcacgctgaagcatagtcttgctagcattagtaccgcatgtggtcatataagtcgagaaactgaacatcaagacgacaacactgccacccagtccagcgtagattccaatgtattggccggtcgagagccccgggtacttgtcggaagtccaataggacagccacaaactagtccagatgttggcgacattggtaaggccgagcaagatgaataccatgatagcattgaaataactaccggaggctcgaatatatgccttccagacactccagccgacggatgcggtggccttctcttcttgctgcatcagagctgcggcgggttttgctggggccttcttcaaacttggctccttttcgtctatttcatccacgacttcgcccacagcctctacctcttcctcttgcatatcctcctgtcgagaactagacatcaaccgcttgaagacctcgttgtcacgcatgaggttgtcgaatgtatcgaccgcactgatccgtccctcgtccataacgataattcgatcacatcgactgagaacatggagttgatgtgtcgccaagattcggcagcgatctttgagcaaaccacagattgccttgtccatgatgtgacgaccgacgtgtgcatcgacagctgacaaaggatcatccatgagcaccagctccgcatcgaaatatatggcccgggcgatattcaatcgctgtttctgtccaccagacaccgtgatacctcgttctccaatctcggtctggtctccattcggtaggatctcgagatctggggtcagagcgcatgcctcgatcacttgctcataccaagtctcattatactccttcccaaacaggatattgttgcgcacggaggtgttttggatccaggcgtactgaggacagaatgcgcgtgtggtgctcaggcgtacagtaccatcagtcacacgcatatctcccgctagagccgagagcaatgaactcttgccacagccgactgttccaattacggccaacagttcatgtcggccaacttcaaaggtcatatctttgagtttgaatggctctgtgggagtttcatcggtgttatcgtctttgggtgttgagtttcctgatggttcagggcgtgcagctgccttcttcttggctttgtctgcatccttttcgtctgttgggaggcgctcccaggtgaatgaagcatgttccatttcgattgcattctccatgttctcgtcccgctcaatatcttcattttgttcttcggcgagcaggaactcctggattcgactaaaagcagttgaagcatcagtcacttgaccgataaccattggaagcatgttcaacggcatccgcagggaattgaacaacgccaatgaggagaaaaccagtgcggcgttcaagtcatgatgtgatagtgcataggtaacgaaagacagcatggaggcaaaaacaggaatcgacatcgccacacaaagaatgccgtttcggatcgcaagcaaggtctggatggatcgaatttctcgtccgcgaatctctttcaaacggccgaggaaactgctctcccaaccgaagtatttcacgaagcgcacagcttgcaggatttcttgggtgagagatacacgctgatctgtaatcttgttgatactccgtcgtcggctgatcaaggatcgcacggcgaaagtcaaaaatggcattccgattaccagcaatgcgtacccagacaagcaactgtagccaatgttgaccaagagaaggatgagtgtcactataatcgagatgggtgctgcccaaatcatatggaacatgccacaagccaggttaatacggtccacgtcaatactcatgagagcagtgatgcgaccattgttccatccgcggccatcacctgccacaccaccaggtccaggtagcgcagtatctggcttatgctgtttccctttctcttcgggatttgagagagcctccttggttgcgtccagggctttgacttcttctggtgtagcttgccctcctgccttggcacgaccagacaatttcatagccttgttgaagatgtgggagatcagcactgcgcgaatctgcccaccgacaacttgaccccgatacaggaactggttcgtgcataaactctgcattgactgcatacaggtgataccaaccacgaatcccatacccctgccgatgtaaggctccgggagaccagccttttctgcgacataagcctccgtcgcgaaagcaatgaggtaccgagtcaaatacggcgcaaagaccaacaacagcgaactgagaagctgacagatgccgccgagcagaaattcaaatctgaacgtgtcgtacaatgcccagagaagcgggcggttgacgccactctcagtgcgcttttccaatgcggcgtctaatcggctggacaatacgtcaacggcccgatcgggattgacagtccagatatcctgcaattcgagtggacgtagatagcccactttcatcaacggggacatccattggaaggagataatactgaaaaacgaagcgccatgttctcgcgacacagatcgctctgttgggacgggtggtgtcttttgcaatcgaagtggattgagtctgcgataccattttttctttggcgtaggctgcacgtccgcttcgtcgggtgctgatcttaaggcatcggcccggagcttttcatccgccaccactacttcacgcagcggttcgggtgcggacatgctggatgttgaccggatactgaatctgattcccagctaggcagtgttccggagattcgattataaaagaaacggtgtgagtaatccaatcgatgtgggggtagccacgagctgctgaatgcggaaggcggagataatgtccggggataaagaattggggattgggaggaattgaggacattcaatgagattgaaggagatttcaggggctttaatggtttatagataacttatggcaaagtgaccggatgtcatgaaagggctcggacttccgtgtctgacttttttatgactccgtcaaacagggctaagcttccccagatcgggcttggtgggcttgtcatggcaaatgagagttaaaccggagataagtcagaggagaacatgcattcgcattcgtttagaacttcatcatccatcatctagtctcgtgggcagtcggcatcgcgggcttcgggactccgagtgccgacatttggattagtaatgtttaaataggcccacggaatggggaggatattggctgaagtcaagcagactactgtattcaaacctcaaattgttatggtctactccgtattctttgtgataacatacaaattttggcccccgaaaaaaaaaaaaaaacaattccatcgtcacgtcgtgggataacaagcagatccaagacagtaagaaatgtgctaggaagcttgtcaccaatgagactctccagtcgccatccctagcccagaggatatgatatgcatagtttacagatcatgagccctccaggaggcttctgtggttgtcgctgcgatctgtggacctgtgaaggttccgttctttacaaatgtatctagccatcaagctcaatcttgaccttcttctccgaaggtgggataattttgtcctcggaggcgcccttgaggttgggaagttctgtcacggcttccttgatgattccaagggccttttggatctcctcctcagtgatgacaagcggaggagcaaggcggatgatgttctggtgggtaggtttggcctggagaataagagttagcgatatccaaaccaatcctaacgagtagggactcgaatacataccaacaagcccttctccttcatcaacatgcacagatcccaagcggtatggccattggtcttcgactcatcaatgacgatggcattgagcaggccctttccacgcactgtctggatgaccgggctcttgatagccactagcccatctcggaataagtggccgagcttctccgcacgctcgaccatgttctcctcgcgcacgacctcaagcgcgcgaatagcaacggcacagccgagtgggtttccgccgtaagtcgaaccatgggtaccagcctcgaccgtgagcatgacgtccttgctacccagcacgcacgaaaccgggtacataccacccgagatggccttgccgagcaagacaaggtcaggcttgattccgctccactcgtagcacaacagcttacccgtgcgtgcgataccggtttggatctcgtcgcagatcagcagcgcattgtacttgtcgcagagtgcccgggcctcctgcaggtagtctgggtcggggacaacgatgcctgcttcaccctggataggttcaatcaggaaagcagcgaggttggggccggccgcctcgaacgcctcgcgtagagccgccttgtcattgtaggcgattggtttatttgtccctgggatggtgcatccgataccaggaagataagggccatagttctcgcgtgactcggggtcggaagatagggaaatggcggcgaactaatgcaaggggtataatcagccactgatgtacctttacgggtgtaacaaggaggggtcacaattcacttactgtacgcccatggaagttgttctccgcgctcaagataacggcttgattttccggaatgcccttggtcttgtatccccatttgcgggcaattttaatagctgtctcgacggcctcggcgccggtgttcatgggcatcaccatctcaaagccaaagtagctagtgatgaacttggcgaagcgagggaaaacgtcattgtagaatgcacgggagctcaaggttactcgcgaggcttggtctaccaatgcagcaatcaacttggggtggcagtggccttgattcacagcggagtaggcggagaggaagtcaaggtagtgacggccttcagggtcccagaccgaagtaccctgagcccgggcgaagacaacaggaagtgggtggtagttatgggcagcatattccttctcggactcgatagcctcaacagaagaggcagcatggtagtgggagaaaggcccgttggtagccatggtggatggtggatggtggattgcggggagagctaggaagttgggggaagttggaggatcggcaatggggtaaagaagaaaagaagaggaggaaagttgaggaaattgaagaaattccagagtaaaagaaacggaagacgagaagttatataggtaaaggaaaatcaaaccctttatacgctattccgttaagtgttaggcttgatagagcggatgtccgctaagtacaggtcgtgccgacgctgttccctatgcgcaggattaacctacacgggctccagtggctttgataaccacgatttccgattcgttgattggctatattggctctaataatgttccaagtattaatttgtctaatttaaatcggaaaaaaagagagaaaaactgggggtagaaattcacgtcatacttcggctatcgaaggagacaaatacatatacatgaaccttggagatatatagagaaataaagggctagttatgctccaagatctattataagccaaaatataaaaatagacaatgaatcgaaatgttagggcaattcgatcgctccgtactccgcagagtattttgaatctcggagtcggggcgctcccgccctctctcctttattgaccgtgtttgtgcatgcgctttgtgaggtcagactatcttgagccgcaatgtacgaggggatgaatgagtacctacaatattcttacccttgatcatgtctacaccaacttctccgcgccgcaagcctcaaccccgccgcgcgcccactcaaaacatactcctcttcctcatcgccttccgtctcgtcaatgcgttcgcagttcggacctttttccagccagatgaatactttcagtcactagagccagcgtggcagatcgcgttcggtcagggtcaaggggcctgggtgacatgggtgagtgaatgcgatcgcgcccacacatgactttggctaatatcgctcctaggaatggcggcaccaactccgatcctcactacatcctctcttcttcgccgctctctataaagtcgccgatttccttgccttcaccctcagtttgtctcccgccacacgtgcagagctcctaattgccgctccaaagacagcgcaggccgttgtggcagcaattggtgatttctacacatggaagctcgcagttcgtgtctatggagatgattctcttgaatcatggacaacggtatgtgattaagtatcgggtgttcataattcctctcggcagcaaagagcgcatgctaataaacgttcacagctggtcgcaactgtcgtaaatccctggcaatggttctgctcaactaggacactatccaacagtttcgaaacaacaattaccattgtcgcgttggaactatggccatggcaatggtcggtaggctctaccgccagcaatggccgcgacaaaaatactggcaatcaaatggacagggatcgaggtgtgattctgaggtatgactgaacctccaacttatgacaactgccactgacaatacctacagtctccacgaatgtctgccgctggcagcactcgcctgtatactgcgaccgaccaacattctcgtttgggcaaccctggccggcctcgcttggcttcggacctcttggccccagcgcaagatcctccttcttgaagttatgatttgcgggtaagtaatccaatctcctgataaaggacaagctgaccttttgatctggcaggtcgactattcttgcggtatcttccgttgcggaccgtctcttctatggaatttggaccttcccgccgctcaggttcctatacttcaacatcgcgcaatcactagctatcttctatggcagcaatgattggcattactatatctctcagggttatccccttctactgaccactctgttgcccttcgcgcttactggtctatatcgaaccttgtcaactcgggcttccacagtgggagacagattgcaggcggcgatccgagtgcaattggcgacagtatgccttctgatgccatttgtgctctctttgatctctcataaggaagtgcgcttcatctacccattgttgccctgcctgcatatattagctgcaccgcctttaatgcacttcttctacccagctatcgactcgcaggcatggggtcatactctccgcaggttgattctcataatcctcatgtgtgcaaacgtggtcattgcactttacacaactctctatcatgcatcaggaacacttagtgttctctcctatctccgtcatcagcacgaagcacactcggtaccaacaacaaaagcccaaacaaactcagtctccgaaaccggaatctctgttggatttttaatgccctgccacagcacaccctggcgctctcatttagtctacccgacaatcaacgcttgggccctttcgtgcgagccaccgatcgatctcaacgcaactcagaaagccgtttatcgagacgaagcagatcaattctacgatgacacattccaatttctacgccagaacatgactggtggtctccgtcaccttcctcgacgaccgagctacgcctcgcccgcgcattattctgtatcgggaaagaaccccaacgagaccccacaacatgaatggccggactacctcatcttcttcgcccagctcgagccaaccctctacaccatactgcgtacctcgtcctatggggagtgctggcgcacctacaacagtgactggcacgacgactggcgccgtcgcggcgacatcgtagtctggtgcctggacacagtagagcaggactcctggcgctcctttgcgcaacgccaagaacaggaaagccgagagaagcaattcgatcgtatcgtggaagcattcaagagtgaggggcgcaagcaaaaaaagcggggatggatgtcctcgatgccttgggcccctgcgcctcctccattgtttgcgtcgtggcgacattcattggggtcgtttttctcttcgccttcaaaatcatcaacctcttggccttggcgtgccccttctcgttgggagactgttgtatcgaggctgtcattctcgaagcagaagacaggttggcttccttcctgggtgtcgagttggcttcctgggttgccgtcttggttgggcggagctaaaaggagacctacggaggcagagttgtggtcttgagatcaccccctcttggtctccagctattttgcattatatgtgatgctgcgaggattttcctttccccttcagcttcataccattcacattccctttctctttctctttggtctcttctttcttctttggacatatagccccagactagatcttcagtacgatattctgtcttagttcactagcaatacaggtattaattcgaaatttatatgtaaaacaaaatacaacatttatgtactctttgactcgctaaccggaaaccaaaggaatttttagtgtacaataagaaaatgacagcagggaatgacaagaaaagaaaacagatgaaaatttaatgagtggcaaacagacaatgataatgcgccggacatgcacagacataacacgtctcgtcaaacttctatatccagatcagtatacaagtcaaattgaaaatcaaaaccaaaccaatgtccatacctatgtatttacattgctcggccatctatctgtgtatgatcgaaaatcgaattcatagaactcaaccatagcgagcactcagactagcaaaggcatcggggctatggcgaccattctgcaccccattcacatcgacgctcggctgactcatgtgtgtccgaggatatgccgagttcgcgggtggggggcctgaaaagggggactggcctccagcaaatggagtactgtttgctcctacaaaggagggggcgctcattcctgagaatggggagttgttcgttcccatggctggagtggttccggaagcagctcccatcccgggttgaccattcatgccgccaattcctagccctgagggttgctgctgagatgggttgatacctgcttgtgcggcaaggccggatccgctgcctgtggaggtggtgccaaagaatgggttgttggatgtatcaggctgggactggaaattttgctggggctggagttggttctgattctggtgctggaagtttgtggcttgttgggtctgaggcatggagttgtatgggtttgatggttgagagtatgggttcatcgtgggggcttggggttggtactgttgaggttgttgaggttgttggtgttgctggggttgctgagtctgctgagcttgctcggggatggatgtcatattagactgtgtaggacccatattgtacattgaaagaatgttgtttctgtccattccagtgggttgagccatagattgctgggcctgctggggttgcaggtgggactggaattggctggggtagccgcctgcgccctgtggtgtgttgggcgccgcttgctggaacgggttgtgagctcccagtccatttgatggctgcagctgttgttgctgctgctgctgtacttggagagaagcattcggtccaaatggcgaggcggaagacatgaccggcatagtatttgcatggcgaggcggttgaaagccacctgggttcattacgagcggattcatttgttgctgttgcggctgcatttgttggttttgaggcgcagtgttgaagaaagggttcgtttgcggtgcattagggttggggtatgtctgattagccaagccaccttgcggctgcggcggtgcctggtcgaatggattgtagctattgtccattggctgaggcgaggtaacatagggagaccgcgagaatgtcgctgtgaccggaggcgtatagggcccctgatatggagagtgctgcatggagcttgtctgattcggatatccaccagtagagtgagggaacaatggctgggaaacctgcaggccctggaaaggctgtgtagatgccgggttcgagttgagttgatcgaatgggttgtacggagtagtctgtggttgaggggtttgcgacttggccacaggatttgagacagcccgatcaaatgggttgttagaagcctcagggaatgtgttgtcggttgtgacggggaatgggtttttggacgtctcaaacttcgagacgcgtgcggatgcagcactgcttgtcccggccggggtcctggctcttgatgtaggggtgcccccctcacccaacctttcaagtgtttcgaccgctcgatccagatcctcatgcagtcccttgagaaccatctcgtttcgtcggtcattggtgaatcccatctgctgcaacgccgccattttggcctcaaaggatgccgttgttacatcagcgacaggcgcaccaagtcctgttgtcctcctggatggcaatggtggtggtgaccaggtttcatcgtccgagtttggcgaagtcaccttgggcttgccaccaaatcggcggaggttcgaggtagaggatgacgagcgtagaccaaacttgaaaaaccttcctggcttgggcggaagcggaggaggagaaccttcaggagatatgtcatagtccctccttcttggctgcacgggggactgggccctttggctggagtaactcgagtcctccctgctcgggggctttggcttcccattttccaaggaatggtgttgatatttctgccggataaaccgttccatgcacgcatcgtcctcgtccacgtcggtgggaactggcggcttgatgccgcgcgggttgttcaattggttcataatggtgttaccatgcgctttcatgttctgacaaagtccactttgtcagctcgtgacctttgctattgcggggttccagattgtgctcacatcaatttggtctgctgtccatgtgtccatgctcaaagatttaaccttggaaatatgtgtgcccagctttcggtgcagtgtggcgcaacgcatgcaaaggaagatgccaatctatcggagacaagcagtcagtttgtgaattcgctcggaggtaaaggaagcggtgacatacgttccaactagcccatcctattcaaataacaattagcgagatcaacaataaaagtctctggggacgaacctgggttccaggcaccgcaatcggcacatcggtcattgccaggaatggtccggatcagctcccccagggttctttcatgccgcgcctgctcgcgcttgctgataccgggagtcatgatgcagaaaaataattacaagaacaaataaacagaaggagtggcagtaatacaaagtggaataggggaagatttctggttcccagggcggagaagggtctcaattgacgtccgaggggcagatcattccaaatgagacatatatgtaccctgcggagcatacggaggcccagggggtaaagaaatagcagagtagagagaaaagaaagatttagacattttagctcagttgttccaaggttgagttgattaagttagattgagttgacaatcccattctcaatttctttttttccggcatagctttctgcataggcccgatcttctagaacactttaaatgcttctgtactgcagagactcgagcccaggctcatacgttcggaaggataagaagtcacggaatagatatatattattgatactagcgagaagaaaaattggcatgtctggacagcaatgactcgcatctaccaatgcgcctaaaggccgaagccttttcggagccgtcgagaagtcgtaatgatatccaggaatatcttctagtacgccaatatgaccaaccatcctatgatagaggaattggcggttgattatgcgttcgtaaagtgtaaagaaggaaagtctccaatttgcgcggaaattttcgatacaaaagggcacggtcacgtggctgtactagctcgatcacgtgtcctggagattgagataaaaacttttcacctcacagcttgtcttcctctttaaccatcattcgtgtgttgaagactcgagactccaatcctttaatgtcggggattgtcgaggacttggatccaacattcggatgtaaacttcaaaccacataacccgcgcggtgcctacctgtggcactgttcgtctcttgggtgattttataatcgttcgttcgtggaatatcaaaaccaaacagtttttagcagagctgcgtctactccaccctggtgttcatatctattgaacagcaggacttttttacgacggacatccccgatcataatggaaatatattttcaaattcactcttgcgtctatcatatcgtattacttgtcatggatcattgatcatcgtacttattttcaaggttcctcccgagggcatgtacggggacttacgagtaccaacaatagcatttgcctatatcacatgaccacccatactcggctgaactgattttccgtggaatagcatgcgaacgacagctgtagcagtgtttactcccatatgtagatctttcttctagcgcataagcaatggatttcgtcaatcttgccgtacagcaatctgatcggattttctaggtgtggattcaaaatctgctcggaaattcacccaaggaattggcaggcaagcttgcttctcgacattgcgatggtaaacctttaacagcttcgcgccttatgaatggtgcattcaatatatgttaccgagtcgcctttgcaaatggctatcgcgttgtggttcgctttactgccctcggtcgggtctctaatattccccacaacatctccagccgcgaacgttttgacaatgcagcagactatttcgagaagcttgctcgtcaccagctctaccatcttagactacaacgcaatgatacaattacaaatgaggccgactgccgcaagaagtatatcacgcgatgtctttttcgcaagttatcacgtcaggtatccgaggaacactgcagtggtccattccagctttattgcaatgatcttcgcccttgcaatatccttgttatgcatcgaggcttatcgttactggggtggttgattgggagttcatctatgctgcccccgtttaattcacaatgactgctccttggtggcttttattagaaaaaccagagggctgggagcctgatctcgagcaatttctattgcgttttatcccgagatttcgcactttgaggttctcaaagattgtgaggccagaaaaattcaagactgctctttgtcacaatcccaaagactatcgatcgctatggagaagtcattagaaactggattgttctggatttgcctcgctttacgatacagctctatgttcgatgaaatttattggaatttcatcgatacaaaattccatggtccatttacaacgatcgaggatcaacctactctgctcagtacagaagagcaggtagaaattgatgccttcgtggagactaaaatgcaagaggcaagcgagggcaatttggttacatatttacagcattgacgaactagttgatctataaacatatgatactgtgacgcgtttggaagattcattgagagcaagcaagaaaggacaggttttcaattgcaaaggaatgttaaaatggagttaataggaagcttagaagaaatggtatggacttttgcgttggttcgctaattaaagaggagaataaggcatatttgttcacgctcataagaactatgtatactgcgatcattcacactgctaataaaacaacgtatgctctgaccagagcattaattgatacatttaagattgagcatttatcgacttttagtggatcacacgacagcactgtcatagcaacgtacgattcatagacatagtagatagtcagttaggaccatgggtaataaaatcgtgaccattagaaacggtcagttgtgccaaggaatctcgaactcaaagattcatagatagcttatttgacgtcttcactaattaaatatagatgtagctccgtatctagacctcgattcttactgagcaaaccacctgggcccggggccagccgttcgatcaggtaagcagatcagtggcgctgtgggtcagcattggccaaacagcgctgggccgttaataatacatttccgacacctcgggatgtctttctacttacgcctctggtatcaagtctggattgccaataaatgaggacaatctcctagggctacctacagatagccacagtgtaacagtcaacaaaaatgcgagtcatgaaagtctggggttggtgtacggtgatgtatggtgatgtactggaatgcggagacgagacgaaacgccgaggcaatagcatatgtggcccccttgattggctgtgattccatgagcttctgtccaatgtaccgaagtattgaaatcagggctgtactgacactagaaatgggacagcagtacaaatcccccggttcttcccttttctcttcccttgtacttataatcccgcctttgctttcccttccttgagtgcagactcattcgacttcctatctcgcgccctctccgtcctatcacaatggcttcagctgccagaactgcttcccgggccttcctgcgctcgaccccagcgacttcctctttccgtcctgctgcgcgcagcacccgtttcgccatccccgccaatggtgtccgcgcctctgctcgtcgtggatatgcttccgaagctggctctgagaagtctagctcatcctttggcctttgggctcttggtcttggtgcccttggtgccgcaggtggagcatacctctacctgaacgactcctcccccaagggcccgttcgtccccacccaggccgactaccagaaggtgtacgacgctatcgcttcccgtctggccgacgagaccgactatgatgacggcagctatggtcccgtaagtgcagtgcttctgttcaaccccgcaatccaagatcaaagagctaacctagacgtttttgttgctctcaataggtcctcgttcgtctctcatggcacgcaagtggtacctatgataaggaaaccggcactggaggcagcaacggcgctactatgaggttcgccccagaggctgatcacggcgccaacgccggtctcaaggttgcccgcgatttcctggagcctatcaaggctcagttcccttggatcagctactccgatctgtggactcttggtggtatctgttccatccaggagctaggtggccctaagatcccctggagacccggccgtgaagacatggagatcgccgcctgcactcccgacggacgtcttcctgacggcgccaaggaccagcgtcacattcgcaatatcttcggccgcatgggcttcgatgaccgcgagatggttgccctgatcggcgcccatgctctaggccgctgccacaccgatcgttccggcttcgacggcccctgggacttcagccctactgttttcagcaatgagttcttccgcctccttgctgatgagaagtggatcccgaagaagtggaacggcccggctcagtacactgacaagaccactggaacgctcatgatgttgcccaccgatatggctcttgtcaaggataaggccttcaagaagcacgtcgagcgctatgccaaggacagcgatgtcttcttcaaggagttctcagatgtgtatgccaagcttcttgagctcggtgtgcccttcaagactgaggagcatatcgtattcaagacttctgattccgagtaagggaattgctcgaaaattgcctaatgttcctgtctcctttcgtatatacctgtgttgatatccgagtcattactcactaagatcatttttcttgttgccaatggaagtttagattttctccatatttgcatagattagtagccccaattgtattcacagcatgtaagtttcgccctgagtaggatgtagcattagcattggagcaattattcaatttgaatgtagaacagtataccttcatgaccagtaatgagaaaatgaaagagagaaaagaaatagccaacgcttgacatcaacaagtatgggaccgggaggccttttcccaaagtggcgtgcaagggcgacccgccattttcaaattctcatagaaacctctcagtaacaaagctcaccaaccccgctttgcagcacctgctaccccagattatcgcgataatttcctggaatgcacgcgattggcctctccactagactccgaggtctcaatatacagcctggcgcgtacctccggtcgctcgaacggaaacagcgcaatcagatacgacgaacaggtcctgaacagaaggaggaatttatgttgtcgacatgacgagaacggcgaacgctgtggatctatatgaagtcctgtctctctcattcacagggtcttcgtcgacagttctctccaagcagcagatcaagatcgcataccataaagcattgctacaacaccatcctgacaaggcgggtgctgtcgcaagggagaccgggctaggcagatcgactaactctacatctgcatctactccgaaccatctctctgccagctccgatggcaactcatcgcgacaactgtacaccatcgaccagattaccaccgcctacaagaccctatcggaccccgtcctccgctccgaatatgatcgctctctacgtctggacagaccgaaggttgcggaacgggagaaaaccggcgatgtgttccacactggcttggagattgtggatttggaggatcttgactgcgagaaggcagagggcggcgacggcgactgctggtttcgcggatgtcggtgcggtgatgagcgcgggttcttggtcagcgaggaggatttggagagggaggcagagcatggcgagatcattatcgggtgtcgcggatgcagtctttggttgaagattctctttgcggtcgaggcagatgaaggatgaagggatgacttgccatacggtctgtcttttcctggtcatcatctcttctctagcataccgttgagattctggccggctctgcagctcatatcttgtcgctgtgcgataaattggcatcccgtggtttcatgtctgcgttggtctatgtctcgtccagagactaggctcgttggttcagacagggtacaggcttggccctggggctgttcgtgttcttctatcatgaacattcatttttccgaacgatttctcttgcgcacttggatctcccccaatctcttctggtttgtacacaccaatcttgtgggaccctgtgtaaaccaagagcttacaccaagcgtgatcttcgttttggactcatcgcacgttgactgagtaagactcaagcaccctactcaatcccaactccgacctcttgtcttcttgttggatctgtcaatcatgcatccaacaatgagcccgaatgctgtaccatagtaccatatatttacctgttaacatttagttctgaatctagataaggatacactcgtttatatatttattttataccttcccctagaggagaagaacaaagatgacaaacaatatatatccaacatcccacaagataaaaacacacttggtaattcggcattcgagttgacctcagtaatcctgcattttcaaaagtatcgaatacttaccatttgaaagaaaacaacaattagttagtatacgttcctggcgttgtccatatgaggttgatggtagaggggctgatgacatatgcggaggcagcaaaacacaacctcacatctttccatcctcttccaccctccattttacactcattccccccaacttcgccatgtctgtcattgagatctcatcgaaggagcagttctcgtcgctcctcacctcctcccgtctggtcgtggccgactgtaagtatttgctacagcgcgatcctgccccgccgagaccctgtcttcccctccgaacgactagagcttcgctaaccttggcctgatacatgaacagtccacgctgattggtgcggaccatgcaaagctatcgcgcctgcgtataacgcgctggcaacccagctctcccgcccgaatcacatcacattcaccaagatcaatgtcgaccaccaacaagagctcgctcaagcctatggcgtcacagcgtatgtgaaattcctcccaacatcagaatctagcctaacccgcgcgcaaattctaaaatatcctagtttactaacaaatgaacgatatctagaatgccgaccttcatcgtcttcaagaacggccgcgtgaaccaaacagtcaagggcgccaaccccgcacagctgaaccagatcgtccagaagctcgcatccgaggcaagccagacggacgatgcagcaggagccggtgaaggaagcagctccggtgagctctggctcggcagcacagtagccaagggctacagcgacatcacagaccaggttaacgtgaagggattggagttgttgaaccgggacacggatacggcagagccgcgcgctcttttcaacagctcgaagccctccggactcgcagcgaatggcaagggcaaggctgctggccaggcggattggacagagagtgacacggacgagcagctgatgctgtacatcccattcaactcgatattgaaggtccagtcgcttcagattacttctcttcctcccgcggacgccgatgccgacgccgacgagacacccatgcggcctaagaacttgcacatctacaagaatacttcgcatgtgcttggattcgatgaggcagatggtattccccccgtgcagaaggtggagatccagtctggtgattgggatgcgaagaccgggactgcgacagtctccctgcggtttgtgaatttccagaatgtgacatcgctggttttgtttttcgttgatggggatggggacagcgagaagctgcgggttgaccgcattcgcattattggcgaggcaggtgcgaaccgatctatgggcaagctggagaagattggtgatgagcctggcgagtaaagatagactacggagaaaaaagcctacgtacgctatggagataagaattgtgagctgtcttgtgtgatgaattttcaagacagagcttggggggatcaacatttgtgtcgactttatgccagtgatgatacggagtacagttcaacgtctaatgagagagccagctggctgtagaaattttgcaaaatttgatgaattgattccattgtatctagagctatagaaaatacccgagggcataaaaaaaagtatgtttgactcccaccaggaggtcttatccttgtgatatcagaaagacccataaaggtaagaatcaatgtgcaattcccttcgtctgtggcgcaactgacacctggggtacatcactgaaagccagactaatggccgtagatgtccaggcaacacgggttatcgagttgcgccgccgcacgaagaagaaaagaaagaagaggaaaggcgccggttgagaatttcttttatgccgggccccggagatttagtttttccgcttgcctttaacggaaacttccaaggatttcggcgcagagactttcattatgtaagccatatgcgaggagccaatttttttttcagttgatgctccttccttctttttctctttcttccataaacatggtcgatgatgagaaatatggattctatgataggaagagactgactccttatgggggcgtgatctcaattttaccattcctgaggcccttttgctgtttattcctgttggggagctcgacctgcaaccagggcgcgcttcgatatcagctcacaatagttgcttccccgagtcttccaagttaggattgcgttttaatctctcaaaccttgcagttagagttagtaacgcatgcacgagcacatccattccatatccatatgcggaacatctattcctgtttcttgatcgtaccatatagatgaaatgtctgacccgaaaccccatgaccttcgaggccaaattgccgtccggatatcaccgttgagacgaaaactgtacccatcggagaaaaaaatcagacaatgtcgcacaagcgtcaaaccatcatggagccccgtatgattagcgccgaagctggtacgcggagccgcaaatatatccaattcggcccgatagctacactggttgatgaccggatgcacccggcattctcgccttctcacaatgcatcccgtacggagtatagccgaaagaggatatagcaggtagctgtatggagtcctcggtatggacacagtgattacatccgcgacccgcagatggagttggagctcttggcactctatttaccgcgatgcaattagttcatctcgttcgtaggagttgacaggtacgtagccgagatcgcaactcttgttttttttttctcttccatctccatactccatccactccactgtaggtttggcggatagatgcttgttctaggaccatggactggcttgtggtgcaagttgtgacttggtgggtatgcggcaatctgtgttttggtggctgtttcatgaacatcaaagctggattgcctgatcgctattgaagattcgggtttgccggaatccacggtgatttctcaagtttaggtttgcttgccggttccgttgtcttgactatgcgcgcttgtgtttgggcttggcatggagaggcttgtactagctatattgaggatatgagttagttgtgttgtgtgttgtacaacttatgttgtagcgagttttctttcgcgaggtaccttctacctacctataacggtaccacgtcttggattcaggttctgtagaaacaactgagacccgctctagcccgcccggagatgagcaccgtccagtgttttgctgttaataacgcacgccattcagactgtgtatccactggcgatggcgtgtcttcaacagcgatttagactggatagactcggactggccgggcgctggacagcagacaagacaaagcaagacaccggcttggagtgaacagagtcacggaatataatttcatctcgaatagaccacgggaggtttgctgtttcatctcagcttaggctgtgatttcagcttatggacctagaacgagctccaaagtcattgatgagatgttgtgttgggctttacacacacaccgcaagagacagagacagccagcgtgttcgcaaaatagcggtcttgtctcgtagttcagagtcatcgccactacggagtagctagaccgaccggcagtgaatctgttacgtaccaaatattgcgcgggaaggtaatcttcttgcctttggggttagacgttagaaggagccacttttttggtttcgagactttatgagcctaagtcctgcgacaatcagattctacccgcgtccaatcgaatacacggtgtcgtcatttgatcttcttttcagtaatatttgcaacgctcttctgaaatgtgttttttttagggatatatgctccttcttagacacgcggaaaagggcggaaaagggcggaaaagggcggaatttgtgaaaacgacttttctatgcataaccttggactcgccgagcactacatatactaactctttgttagcctagggccttctattcctagaaatctcggtcctaatagaccacatggtgattgcaggaaaaattcaataggatagttaggggtgatttaaacaacgcaaaatgtggagtttgtacctgaagtagatgggaactggagccggtcgtcgatcatgatagttcagggacaaaggtaggcagtcgccgaaccggacctctccgagttggatacagctgatacgcttaccggatagtaattagtacacttctattctgtatactccacatgatgtacacgctagatttgttcttcggggacttctagtgacttgggtggggaccgacgcccatagactacgggatagcgcgatgttggagaaggtttgcacctcatgtgaactggctgcaggtgtggaatgtttctctatcatcgtgaagccgcgtacgacaatcctaggcctcatcgggaatactccgccagatgggtacatagtgaacctcagtaccagggaaccatacaagattagatcagatagggcccggagaatcacatcattctggactgggaccccattagtaccagagataacgatactcgtacgacgatctaattattttccgacccactgcgtgtcttggggacagcccgataattggatgaaactatacaatctacggagtatgttggagtcttggtacctgagccaaggaagcattccctttttatattggggtcggtccagggcgatagagatggttccacagaaatgcgaaaaggacttgaaatccaagtgagctacctggttggcgaggccaggctatgccctaatgcatattcccaccacgggctggcaagctatctccgcactcatatatatatattgccgcgtcgcaggctcgtgccgagtccaaaaatccttcgatcgaagctggctcgttgtaatttgtccaatttgtctaatctgtgggctgtaggccgcctgtgtggagagtggggatagtcttcacgcaccattccccattctgccaagtatgctgtagtcgaagcttcataaaactctgtgcctgaagattgcaggatacataataagaagaacgtcgagaaccttccaccggcagagttagcttctcactttacctgatagagtgttagtggtagcttgaaccttccaaagctggaaatatccgaaccgtcgaggaaccatcgcaattaacgagctgataactccaagtggaccgcagactcgatgcgcagcagatcttacctgaaattatccctggcgccccccacgttcttccagccacgttagcacgccttatagttcggtagttattaagtttgatgtgcaacactccgtactccgtgcaatgccgcaccttaagaggtagaaagagctcgaaagagcaagttgcaagcgacgtacggctgatcaattggaggttatccaggtttcagacgatcggctcagggtctggatgccacactgggtctagtgtctcgggtgaagtagccagttacacgcggtcctcgactgactgagatcgcgatatgactctggagtccggagtattttcccggataccgaggaacatatctgaaacacatgcctagagactagcacgccactcttttgactgctaatgctgtcggagtgtggaagttgatacaaattttacaaattagttcttcctgcaattgtgccaattgcgtcgcattgccagacctccttctacagagtgctttgacataggatagagtacaatgcaacaccacggactccgtccatacacagtggtagcgattgcggggccgtttaaatccctgattagccaaaccatgacgatttacccgcgaagaacgatgcgctcatcctctgctcaaccatggttgtgcgactgtgtggaaatgggatgatcgagttcacgccccccgcactttgccgtatgtaacacccatggatggaccgaggaccttggaagggatatttttttttggaactgtgtatctctgctccgtatgggcgtagcagtggcgtcccgtgcgcaactcgcctaacagtagttggtggcagtgacgccacatatgtttggcgtatagatagcgaggtggttttgcggaaagcgccttgtgttgtctgattgttatattaaagatagccgaactgtaaccacctgatattaagaccacaccagattgatatcgactgagatactgagatagcaagatagcaagatcggatctcaccactacaacttatgctgtgagggcgaaacctcttagttctcgtatcggactcatttttcccgattgggaagccatctaccttccgccatcgaggcagtgagctattaacagctaattaatttcgccctttgttattattagcgattccccgtcctcgcctcttccaacagtctcctgctcattccagaaaacttccctaaccggccattttgaggccagtgccctccccaatggggaagtatgtccagaagagagaggtacaccgcgaagtgcaaagtatgggctccgctaaaaatgcgaccatcgccaataatgccccccaaaaagagtcggatccattctcgaaacgcgaaactcgaaaataaaaagagctaagccaagaccgggcccaccttggcgtcaacagcctcagaaaacgcgtgttcttgcccattctgcccagatacggctgcttcggacggtgtttcagattttaacctcaacgtgcggaagtgcccgcctaattatcctgcacagttgactaaattaattgcaaatctcaaacaatcaaattcccgagtcggtttcgggggaagggttgtgtacgtcacaaagtctcgctacttttcgaacactttccctcaaggtcactgctatccgctttagcttctttttaattaggtacatgcgccacttaattcgttccttcgttttagcgtccagtggccaacggtcataaaatctggggtccttgcgcgtcttgggcatctgaattggggaacttctggaattggaatggttcctgtccactttggagggctagtaatctcaagcgccccagcgctggtacccgcgctggtctcgggatttgacaaccctacaccctacaccgtagtacaccgtagtagagcctacaccgtagtagagagtgccagcaacatagtagtcggtctggagggctgggtctgtccattattggagtatacggtatagcatggcaaacactggagacttgcaaaagcctttttccgctccatggcatgattgagaaccaaactctttcaatcctttaataataacatatgatgtattgtatgttgtttacagagtacagagtactacgcgaacaatgaactttttttttttttctagcctctatctagaagcctcggtggtcccatgtgaatggcctcggtggtcctcaatggcgaactaatccctgcgagtcttctgccaagaaccgttgacaaaaacccaagcgcagaagggccgtgaattccttccggatctactatccacatctctttgtgacattttgcgacattttaagtctcatatcgtctggtgtatcccaaacccacaatccttgtggcgctggcacctacgtttgcggaatcctattctcctttggccttgtggattgccaattgccaattgtgggtttggatgtgtaggatacggtgaatccctggtggaccagggacgttatgctcaaacccaccgatgcatgggagatcctcaacggtacattacttccgtacctatcgcgacatccaaatctgaacccttgctgcgggctctctcggtctcgccccctccggggaaagactaatccgagactctgcatatatctcgtccggggttaaccatgacagatagactgatcaatttttgctgacgggctgatcctcgaatatgggcatattatgatcgccaaacggctacgcgcatcgcagacgggaagctctcacagacatccccatagttaaccgccagcagccgagcatgattcgtcggggaactgggaagatgctcgcatcctcggccaagcacaggttttttttatttttccaaatcgcacggtcgattctgcgatcagggcgagtccattttacttggtaattgggagtagatcaaaattgatcaatttgcctctttgttttgctttttcctctttctctctggacaaagaagaggtgtgtactccgtacaccgtcaatcgtactccgtacacttcctccacttgggtctccattcgagagccacttgggggggtccggcttccctggatggccttccgcggcctttagttggaaactaggcactgcccgcccgcttccatctccatgttctccactctgcctaagagctggtgtcaaggctagaagggccgttgggtagaagtgatttggaaggtagcttgttttatcccgcgtggaagtcttgatttatttcccctggacttttctcggggggagctctctgataggctcctgggcgtggagctattggagctgttggagctctcgagtgacgactagggaaatgtggacttcaattcaatagcgcctagatttcggcttccggcttcaatccatcgttctacataagcgttggcaacgagcccgtgggattcgtaaaagccaaaataaagtcgtgccgtctgtgcgacaacggtggcggcagggattcgggctatcaaaaagtaagtccatagtctcaaggccagggccaaattttgagatctcgagtcggaactctgtaggctcacggaataaagaaattgggtggcgcaaaggtactacggagtaattagcatcaagattagaaagtggatggatatggaccttggaacttctcaaagaaggacttgacagccttccatgcatgacccttttccatgtccacgggaagtatctaagcccaaaaggaaacactcgaggcccggagacccgggtgtctccagtgtgtctgtacgagtacggagtctccatacttcacaccgtagactatctttgttagagtggaacggcaatcaatatctatcagtgactctccaatttccccaagtccacattggcgtgctttgtatgtgtctcattggtagcggatgaagacaaatctccgctggcgccgacgctttgcctgtgaagggattagccaattggaggggcgcactatctttagaagtggccaatcacgcacgagatgctccgggttcctgacattccttaagtgccgggatattagtgtcggtttttggtctggactcgagggagaaaaaaaaagggacgttggagattaggattagtgacttggtgacttgggaaaatttgaatgattttggtggatagtttgtatcttaatgtacggcgtagagaatgtgccacgacctggaaaataagaatagaactggaccttgcttgcgtggccggttactgtatgtcattgggctgtgttagtcgatgtgtcggatgatgcatctgtttgtgcttccgagttttcaacttgggatgagaccggtcacagacaacacatgcctaccatagtgacgatgacgcccatggagtgcgctgacatatactaagcgcatattcccccggatctacaggtcaggtcagtgagacaaaaagtgctatcacatcaccctgcaaatcggaacacatcacttagcgaccacattgacccaataagatgcatcataggtgagaccccattaacgagcatctcactaatgtactggacttgggccccaaatacaatataagcaccaatattagccttatgtctttgatcgtactttagcatatgtagtctggggatccaatcaatggacttagggcaaccgaagtcggtacgaagtacaccctcgacgatttgagcatcaaagggaactgcatctgagccttgcctttcgagggccaagcacccaataagcatgttttatgtagctgcctgtgtgatcttgccccccacaggctggttcctgcagtaggccgcacaagtagactgaaatctcgcctttctcggcttgcatattgcatacaacataggaattagtgtttcctgtttttttttctttcttgctttgacgttttgctctgcctgaaatattgatgccattgacgtgtacaatgtgagatttgtctgtatggaccaaatggcatagcccttgcagcgaccggacaataaacacgggtttgtttacttccaatataggacccatgtggcaaaccaggtacgtacaacttacgaactacgaacgttatactccatactctatataaagatcttcaatatggatgggctccgaccactttgatagggttcaacggcttttgattttcggtgatgaccgcaccgaggggcaatacctaggtcatatgaaatttggccaggaatgcaccgagtaagcactgtacggccaatgccgaccgtttcacgatcgaaatcagatggttgcacggtggtcgccaccgttgatagcctgatcggcaagtgctgagcgacttggggatgggcagcctaaactggcaactgattggcggggccttggggtcttaagttttccacctgttgatcacggcggaacataccgtctggagtggacagatgggaagggattcttccgttgttaatttcctatgtgcagttggatgttgcctgccattagaagctttgcaaggtacctaggtaaccgtacagggtactccgggggtacattggtctgcggtaccggacgggatgcgtgggcccccaatgcttcggggctattggttcccgaaaaagcaatgcgaaaagaagaccgtctgggttagagcgctcttatttgtccgacatcgccttgataagacggattgagcaattgattagcgctgtcaccatcatatagtccaatggtcatgcacctcgtggccacacctcaatttttagatcaggtctcgggccactctttttgcctctgaggactttgtccaaatcaaaaggacggccaaggtatactgtaaacatgtaaacagccccggtagtgattgaatggtacggccctgcacttggccgaggtgtaggtacaacaccttactcctttggggatgaggaccgaaacggtacttgggtcaagataataaaaacgatgtattatcataaataaaccaaaatatggaaattcaatttgatttaacttaattgttcctgagtgctccaccccaccgagcccactaaactcctccccaatcaatgcgattggccgcgtctgacgggactgagcacttgatgtgcacccagtgtctttcgcaatcccgccccggactggaatatctcttattcgattattcgattattgcattattggtattttcgatttaatcggaattcctgagacaaattaaaattcagaaaagaaaaagcacccggttcctggcccacacccaaactagtgacccggcaagtagaaaatagtagcagatcactcatttatccaccgtagcctgctatcttccctcaattgtcttctctcgctcgctttttttttatattttccccgctgtctattttgcatactcacactctctctatccaatcttttttttatttgtttgactattttgcctattttgggttgggggtttcctattggacttatttgggatcctctcttctatatcactcactctccttcctcaagtactttgtctcccggttcccagaacctgtccttcctttctcgacacactcattcatcgtcaacacatatacaacctaattgcttagtccattcattctttcggactcgaatcacttataatcctactaatctaccgcgggagacttgcaattggactttcaaaaacacttcaggtatgtagtatatctctataacattggtctgcctcttgcttcttgcttctaactcatccttgcagcatcacattcacaatggactcaccatacaatatggcacccacctcggtgcaaggccagccattcgcatactactccgactcacagagacaaggccactaccagtcagacatcccatactacagccagatgcagtatggccaagagcaaccgctctacacgtcccagcccatgatgaacatgcaccagatggccaccaccaatgccttccggggagctaccatgagcctgacaccgattgcctctccacagccctcgcaaatgaagcccaccatcatcatgcagcagggttcgcccggcttgatgcccttggacactcgctttattggtcacgacttgtactccttcccctcgactcctccgctgtccgcctcgggaagcaccatcagcagccccccgtctgctcatggcgccctaccaaccccgattcatgacacatttttcaccttcgacaaggtcgagggtgtcaaggagggatgcgagaccgacgtgcaccaggagctcctggccacaccgcagtgggcgcgctctgattcgcccccgatgacgcctggtgagttttatagatcacactttgataacggaatgtggatcgtgggaagcaagggcgaaaggctaattcatcctacagtcttcattcaccccccttctcttaatcacatgcactccgaccttctgtctgcaacatcctgcccctcgctttccccctccccctcacccgtgcccaccgacattcttgcctcccacaatctgggatcgagccagtctttctgcgatccccgccagcttaccgttgagccctgtgtccacgttcacgcacaggatctccctcctctaccgaatctctcatgcgaggaggaggaacctcgcgccgttgttggcagtgcgtctgtgacgctccccgttaacgagaacccatctccctctttcagctcctcgacccaggatcctctgagctcgctgccgacttttgacagcttctcagacctcgattctgatgacgagttgaatcgcctggtggaattccaccctgccgccaatgccgtctacatgggtggcaagcgccagcgtatgcacgcctacctggtggaggatgatggattcctgagcgagcacagcctcgaagactcagatgattccgagactttcttgcccaatggtttgccatcctttgagtggacccagactgcgcaccctcaggccgagagcgaggaggaacccatcgaggagcccaagatcaagaagcgtagcaaccgcaagtcccgtaagaccgctgccgacgaagaggctgaggcaaaggcgctggccgcctgcgagtcctctggcgactgctgctctgatgacggatcagttgatgattccgagtctgctcctatctcagtcaaccgccggggccgcaagcagtctttgaccgaagacccctccaagacctttgtctgcactctgtgctcccgtcgcttccgtcgccaggaacacctcaagcgccactaccgctctctccacactcaggacaagccgttcgagtgcaacgagtgtggcaagaagttctcccgcagtgacaacctcgcacagcacgcccgcacccacggtggtggctccattgtcatgggagttctggatgcaagcgacgctggttctgtctcattcgacgatcaacatgacgctggtgcccttggccaagtcatgtacgaggctgcccggtctactgaagtcatcggtactccccccgtggatcgccgagcagcgaagaagcgcaagcgtgacttgtcctaagggacttttcatgatttttcttttatgagaccaggagacttcctactgcatatataatacatacattcttcggtcggagtcttttattgggagcttgaccatattggtcttgattgggtttggcgtccgggcatttacactggtgtcggaaactggatcatcggtgcacagcaacttgcgttcccttttcatttagcgttttgacatatcgcacggggacacatacacacaggctggattgcctcgaacggttcttttggtgaaggcacatgggcgcagaagagtccaggaagaaaaaaaaaacgacatataaagcgatgatggcatctgtcttcggcagtgctgggaatggtgtgatattatttcctttgtcaccttgttcttctcttttttttttcctttttccttttgtttcacttgttctctccaatatcttctggaccagcacattcggcgtgagcaatgtgcctcacactttgaatcttcgagatttcccttcgtgtactccctgtttacttcgattcttgtgacttttttaccctttttttctttttctccttcttctaccgtttcgttcatgcttgtttctgcttattcgatgtaatatttttggtgcttttttgctttttatctgcttttgtgtgctggtcacattcgtgtataagttaattgacccttgcccatcactcatacccccttgtattgcattgcccctttgtgttggttccaggtcacatctctagatgttgatttacatgcatcaaatcacaagcataatcttactacactctttcctggtaaacagtattgtactaaaaatagcgaaacgtaaagttagggcagtgatatctgatcccgtgatatctggtctcgtgacctcaggatgtcgcactgatcttatcgctctatcgattatcgataacctcggaaactcacgcaaaggtggggacagcaaaaagtacccccccatcacccgcacccagcaacatccaccaaattcgcgaaaaagagaccttggactccacacctgggcgtatagttgttatgtctgcagcacagccttcagccccagggcttaacgtgattgccctaatctccggtggcaaagactctctctactcgatcctccactgcatccgcaacggccacaaagtggtcgccttagccaacctctacccagaaccgcggaacaaaaccgcaagcgcaagtccaaaccaacgcaaaaatgacgaagaagaagacatcgatagcttcatgtaccaaaccatcggccacagtgtaatccctctctacgaaacagccctccaaatccccctctaccgccaacccatcacaggcggcgcagtcgacacagcccgtatctatggaaccagagccaccaccatggacgagaccgagtctctcgtcccgcttcttcgtcgcataaaacaggctcatccagaagccaacgccgtatctgcaggcgccatcctttctacttatcagcgcacgcgaatcgagagcgtcgctaaccgcctgggtctgattcccattgcttggctgtggatgtatccatctcttccagcccctacggctagaacggccgatgccctggcaatacgccaggcggggctgttggaggatatgtcggccgctaggtgtgatgctcgtattatcaaggtcgcctccggtggcctggacgagggcttcctgtgggagaatgtctctggtgttgggagtggcggccgcatgatgcgaaggtgtcttgtcaaggctatgagtcggtttgcagctgcggaagatatccgtggcgcggtgctgggtgagggcggagagtatgagacgcttgcgctggatgggcctggtttcttgtggaagcagaggatcgaggtcggtagtcgggaggagaaggttggtgatgggggtgttgcgtttgttaggttgaggggggctaggtgtacggctaagagcgcgtgggagattggcgatggcattgcgccgagtgatattaggcggcctggattgttagatgcggtttttgagggcgtgttaggatctgcattggaactttttggctcgcttgacgattcgaaatcgcgggcgatgacgagtactgctcggtcgccagattggcctgtctgcgagcccgtgcatcggttgtctggttctacgtggactatttcgaatattgttgcgcccgaggctggtcccggggcaggacagcagatgaaagcgattgcatacaaggtcgagaaagtgctcaagtcctttgcccaccccaagtccggttcccgatcaacagacgacattgttttcgctacggtgctgctaaattcaatgaccgactttggaccaatgaatgacatctacgtctcgctattcaagaagcccaatccccccgcgcgagtgacagtggcatgtggagaccgtctcccgtctaacgtcaaggtgatggtcacattcgtggtggacctgggtgcaagggaacggcgccaggccctgcatgttcaatccaggtcatactgggcgcccgcaaatattggaccatattcgcaagcgttgtcagttccgttgcagaacgatagcagacttgtgtacattgctggtcagattcctctagatcctggttctatggacctggcgcgagtcgaggggtcaagttcatggattgaaaattaccgtcttcgagctgtactggcccttcagcatctctggagaattggtgaagccatgcaggtaaactggtggctcggtgcggtggccttcttggctcgtggcgaccacgctaatacccaggcgcaagtggcatggcgcctctgggaaagaatgcatgctttacctgacaatgaggacgaggatgatgacgatgggccacagctggacgcgtgggatatcaaatatggccgtcgcacagaggagctgaccgatacccctgtgcccagtctgccccagttcactgctcttgttgagtctcacacatccattccaccattcctggctgttcaagtggatgaactaccacgaggaagcgatattgaatggcaaggtctagggggcctgtgcgagcaggtcaagctggacattaaaggggggacatcttccaccaccatggacagtcaatacaagtataccaatatcgagatcgacgcgggttcgtcggacgatacattgaagcaaatattgagatcagtgaaagaggcttactgtcgagattccagtctgtctcaggctgtgttatataccacatacccagtgcctgaagcttcgtggccagtgcaggttgtgccgtgcagatcagtatgggggcgagaaggacgaaggttgagtgcaggtgtggtcctgcagcagtttagttaggcactatttcacaacgaataaagccactcaatttaacaaaagatcagacaaaataatatttaggggtcaaaagatcgttaaacgtcgatgctctactccaccgatgatcgatgtacgcactgtccgctcgcatgtgataaggcaaaatcccttccgcattcaggaaaagataacagtgtcattctgcctccgccacgttctcaatatctccgccatcgaacttaaacaggactaaattgttagttaccctgctctttttctggacgttatactatcctccccatacattgtacatccttatcccaccgcggcatgacgtactcatcgacataagcatggcgccatgagttcgccgtggaaagaagaacaagaagcgacgtttcgcaccagtacacctctggaccccgaagcgttcgccgaagacctccgactatttaatcgctccccccatccataccacagaagtcgacgcctcggatcatgcactccctccgacggcgaccgtctccacccgctctcctcctactccaggtcctcacgaacaaccagcgacagtggcacagaggcagacgatgaaagcaccggtattctaaggggattacctgccccgccccttcgtcctcgaaaaggcctacggtctggtggggtgggtctcactgaggtcgatgactggctgccaagtctgcaaccgtggccgtcatttgtgcggcctattttgcggacgtcgcggcggagctcggaggaagaacttgaggaagaggcctttgaggagagactgaggttcaggcgccagagacgggtggaggtcctccggcggttgttggaggctgcgcttttgttgtctgtgggtggcgtggtcttgtaccaagaccgggcgcgctccttagcttgggaatggagaaagggtatggggaaaactgatattgctaccaaaaatctggggcgcgctaattgatatacagagcttgctgctcataccctcgtggtcttgggtctctatgccagctatccgctcgctgttcgagcatcgcaaggccgaagctggcgcatctggcgcatctggtccacgaaacggacatacttctcaatacccgcgagcttcgatccggccccccttctctatccgattcttatccccatcttcgtctcgttatcgctgtccaaccatctcccgccacttatcatgcctaatatcatcctcagcctctcctctttaccaacgcctgttataccgttccagaaccgggcgaatggatttgataacctccattggatggtctctatgattcccatcctcgtttccgaacatttctcctcggaccatactgtacccaaaccattgacgcttcgcgggctcgacgcagagtctttaatacttctttttcctttgcatcaagcgttgatacccactttagactttttgttgacgaccagcattcttcccgctgagctgcagcttttgacaactgctttgatcaacttgtacttgtttgcggcctctccccagatggagatactcaaagccttgttatggcttggaggcatgtgtttgtttgcttcttgtcgacatatactgcgttgggaggtttctttggctagaattcccagctggaaattccgccgcgccccacatggcgcgcaatctccccgcaaattcttgaacatgatggaccatcgaatttgtgagaagttgagtagaacggcgcacgttccatcggacgatgctacatcggacagcgatggccctaatggcttcatgttttcaaggccgcgcaagacgaagaccatgcaggataatcgctctttccgcccgtcggcagagccgacatctgcagtcgaccaggtcacgacggaggcgattttcgagaagcatgctcgtattgtgcatcgacgacgccataccatatctacattcgacgaagtcgttcgagaggaacgtgtccacaccacccccggtggtagacgcaagaaaatgatgggtcctggcctggcctccttcctctcgctcacttcagcccaggcacaggtccgaaaatggttgtatgcattttacgtgtatgttctgtccctgattatcattcttgggcctattcgaaagtacgtagcagagcacgcactacaaggccaggatccgttcggttgggctattggctacctgctgggaaacttctcgaaaatccgcttttgggtgcttatgttgaaccttgaatactggatcgaactgccaccccgcccagatgtagataatctgagtgcctcctgcttccttgggtcggtcgaacatattcgccaggctacttttggagctgctgtgacccgtctactactcagtggatactgcgcgttggtactactgacaggcctggctattgtggttaagctcagctctgttgccgaggttgatacgcgccgcaagatttttcacggcatgatggtggttatgtttcttcccgcgatttttgtggatccagccttctgcgccatggcgctagccttggtcctctccatattccttctacttgacctattccgcgcatctcaactacctccaatttcgcgaccgcttacctactttctggctccgtatgttgacggccgtgatcaccgtggcccggtcatcatctcgcatatattcttgctaattggatgttcgatacccctttggctgtcgctttccgatctccctcggactggcctgggcccctgggccggttgggaggtaccgtcacgggatgtaagcatggccagcggagttatctgtgttggcatgggcgacgcggctgcatccctcattggccgacggtacggccggctgaaatggttctggggaggcggcaaatcacttgaaggcagcattgctttcgttgtagctgtcacctgcgggctgatcgcggttcgtgcctggttggtgctcggtggctggcccgtgtctgggctcgaatcggctgcagtgacagctttctccgctcacttctgggcctggactttgctcaaggcggttctggcggcagccggaacgagcgccaccgaagcaatccttaccggttgtaatgacaatgtcgtggtcccagtggtgttatggctgctggtgcggggtcttggcgtctgatgtgccacgttgatgtgtataaatgcgcgacatgtttgcttcctatttcctgacctttttttcatttcttttttttgctcggaggtttgcgtgtgattatttgcctatcatatccctacggcattttgtatagtatggtggggtacttagcccgaggatgtatagattgacctcgactactcaaccagagaccatgtttgggtgcctatactagcggcgcgtcattgcatatctgccttgccttagcttcccccctttctctgaatttaaccaaccgctgcgccatgactgggagccataggctgcagataagcttccgtcaccatacagttccatcgtgttttgtgatcgatcacctacctttcaatttggcagtatttatggagtacaggaagatacgaagattgcagaagacatcctccgtttatagaggagccttgctagagtctagacactatatatagagcccaaccccacagaacgcatacgtatatgtatttcttcaccccctagtctccggtataattccggtatccgtgatctgccttgccgatctcggccttatctaatcgataagcacatgacctagatcactgcgatttggacactcccaaggttcttttttgccgtccctggcgctttaaagagggttgttctcgatattccctataatttggacaactgattcatttcctctatcatttgtctctcatctctcattccccccagacttccctgtaccttttcatcttatcgggcagtccagatcatctccacccctctgaccgccttacgcgatcatcgccgcttgtcactcgttatcgttgggtcacaccccccaatcgtggagtatccctgggtcttggggctctcttcccgtttccaccatcacatcatcttgctctttcattaggacttgtcattttgcccccttagatctttggttctctccatattatactcaaatctcctaacctcccgcccttttggctattctgcatctcacctctcaccgctttaagtgttttggatcaacttgtgtttgcttccttgaagtacatcgttctacatcgacatcatttcttataatctacccgagttcaccggtctcgttccacggcactcagttgcagtaccttcccatacccattctcccggcggttcctcgtccttccaggcttcccggaggcatcgtcatccttttcatagctcccctgatgggcctctcgagtcgatcgttcctattgctgctgctgaggtagttgtggttgctggggtgtaactcgatctgatttcccccagcgttagtctaccagagacagaacaggcattggcgtgcccaccgccgtcatggcgtcccaacattcgaggagatcgcgcgaacccccccgttcagagatgtcgatcggtcgctatacacggctcgatgagatcgggcgaggtagtttcgcgacggtctatcaaggtatccatacagtgagtcgtgccttgtcttctaatatgtcaagttgatggatgctaatcggttcccatcacagcaaacgagaacctttgtagcaatcaagtccgtgaacttgtcgaagcttaacaagaagctcaaagaaaacctttcgtccgagatcgatatcctcaaggggctacagcacccacatatcgtggccctgatcgactgccatgaatcaacatctcacattcacttggtcatggaatactgtgcactgggggatctttcgctgttcatcaagcgccgagatactcttggatcacataaatacactcgggatatgattgcaaaatatccaaatgcacccggcgcctcgctcaatgaggtggttactaggcacttcctcaaacagctttcaagcgcactgaaattccttcgtgaccgaaatctcattcatcgagatatcaagccacagaatctcttgttgtgtccctcaccttcgtcgtatcggaccgggactgctcaggtaattccttataaaggcagcgatgactcttacgagcctatgacggggcttgagtccctccccatgctcaaaatcgcagatttcggcttcgctcgatctctaccagccacttcactcgcagagactctttgtggatctccactgtacatggcacccgagattcttcgttatgagaagtatgatgccaaggccgacttgtggtcggtaggtactgtgctctacgaaatggtggtgggccgacccccgttccgggccacaaatcacgttgagttgctgcgaaagatcgagaaaggagaagaccgaatccgctttcctgaagataaccccgcctcagatgacatcaaaaagttaatccgaggtctgctgaaacggaacccagtggagcgattgaacttccctgagttcttcagcaacaatgtgataaatgatccgattcctggcttggtagcggatgaccttccagaaccaccacaatcgccacggccgaggcagcttgccgcaaagactgaagaatctccttataatactgggcctgaggacagacttgcatatcctcccggtccaagacctgttgcaacacgcctaagatcaggaacgccgccgaccgctacacaaatgcgtcgtgtgggaagcgctgaccggcctgctcctggtatttctagggagcaacaattgagagctgcaccagcccaacggcctggacctgtcagccttgccactgccccgggacgccaggagcttaccgaacgcaacgcaactactgcggccgtcgatcggcagagaaaccggaacacttacactgactcttccaaagctagtgactcaacagtccgtgcccaggaggcacgagatcgcgctgcacaagaagtggcatttgagagagactatgttgttgtcgaaaagcgggctgtggaggtcaatgcctttgcagatgaactggctcatagcccacgccttcgaggcggcctttctcgaccaggacaaactggcgccgccggccgtcgggcaacaacgcagggtctacctacagtgtcgccatcttccccgcatgccaatgcggctaaagccatgcaggttgtttcgggtcgttcgcgagcagattccatacatcagcgccagcattcctacgagcgacgttacgggcaaagccctacgtcggcgacctcggcaatctcgaaagcactcaacatggccagcggtcgtctgttcaaaatgggcttctctcctcccctcaccaaaggtgggcgatctccgcctctagcctataaccctttccccgcctatcctcctacacatgccagtcttttgatcaccggagacggctccaaacccaatgcaaccgtagatgaagattgcaaggcagttcaggaaatcgaggaatgtgccacgcgtagtgacgttgtcttcggatttgccgaggtcaaatataaacagcttgtcccgctagcaccttcggcaccgactgatccatctgcgagacctatggacacaaacattgaaccagactctgccgattccgatgatggcctgacagttgatgctattgttacattgtccgaggaagctttggtactatatgtcaaggctttgtctttgcttgcaaagtcaatggacattgctggggcctggtggtcgcgcaagaacagagaagaggcctatggggagttccccgccaaagacagcatgagcgcagctgccggtacccggatcaactacgttgtgcaatgggtgaggagtcggttcaatgaggttatcgaaaaagccgaattcgtgcgcctaaaactcatcgagggtcaacggcgattaccaccagatcatcctagccatccagataaccattccattggctccaccgccggctcgagctcaaccgccgatgtagtagtgagccccggcgtcacagcggagagactaatgtatgatcgcgcacttgagatgagccgggcggctgccatcaatgaattgactggcgaagatcttgcaaattgtgagatcacatatgttactgcgattcgcatgctcgaagctgtgcttgagagtgacggaacgcgatctattccgggtagcaacgaacggcaaagcggttcgcaacctggtgacaagataattctggacgagctgcaggtggaggatcggcaggttgttgtcaaacgtgagtcttgtgcaagtccatccggcggacatatccaaaactaacaccttattctagtcgtatccagtatgcgtggccgcctcgcatctgtccggaagaagttagctgttctatccaagcgatcctcggcgccgactccaacggggggcaagacacctacatccaccatttctccggttgcatatgccacgggggtgacaccgcctagatgagcactttgttctcccccgagatatccaccaaatctattgggattattacgatattgttcgattcagtagcgtcatgattatagccttatatgtataaggttaactcacgacgctaacaattgaccctatttttcacccgcccttttatatatggtaacctctggctaaccccaatgccatgttcctctttttgccatttatctgccacttacgtttctacgaagactaatttcttcgttcatattcttcgatctatttttccagttcacctcttgccatatatcccacagcacgaaaccaggggagttcttattcatgttatttatgtcatgtcatgccttattgcttttttcttcctttactttttctttacctttcttgtcctcattttcggattggcgtttgacccggggacccacggtatacagattggcactgagtttttttttgggctgggaacgcacaaggtcatggcgttggtgtgctccaatattggatttggtgcagatgctgccagatgtattgtacatagaaattgaggaaactcattacatttttttgtctctatactgcgtaagtaacttgcagctgttataggatatggagcacgagataggtatgtgctctacaggcttggctaaggttggcagatatttacaaacgcaagtaaccctgacgatggcgtgcttgactatgtgtcataagtctcagaatttcttcctattcatttaacaccttgggcctttgcctcttggctttttctaggcacagcatattccctcaaagagatttatatgatctccctgacacatgtttgagcctaaaccattgccgaaatcactgacccgacctccatgtactatgaataatatcttgcatttttgaaataaccaacagaataactgccagaaggaccatgtttaccgtagttttaccacggcccgtcccccaaatgtatggatcctcagcagcccactcaccctggtcaccgcaccaccggtctccgaggcttttctttgcgttttctttcattgcgccatgatggttaagacagacgacatgaatcatgcgctgctatcccatttccaagacaaatgtatgtctaattgggttgccaattttcgtgcaatgtaacgtcggcatcgccaggcaatggtgcgatgcagcccgtagcccgtagccttgcccaaggcttctggaactcttccatgtgggccggattatacggatgaaacccacaaactctgctgggacctttgcctccatctggtgatactccgtacgggtcttccaacttgatttccagggtagtaaaaggcgatgcccagccgcaaggacctatggcatcacatttagtactagcacctcatttttgcgccgttgctagccgtcctcaatttgcctcttggaagcgcagctgaatacaaatactcatcgatcgattccactgtgtgggtagtgacttgatctgcataacctaataatggctgaacgggttgaccctgttgttgaggcttctgataagtcgccagtatttgctacaaagtcggccggagatgacggcctccggcgagcagatggtatttcgggattgtgtatgttcttctctatatcgagtgatggctgcgtgacacctctaatcgttctgcgttcagatgaaggaaatatcttcgaggcaacccccgacagccgtcgtcacattggagtattcagtgctgccctcttaatctttaaccgggttattggtacgggtatctttgccacaccaagcactatccttgcattgactggcagtgttggtctctcattgttcatgtgggttatcggcactgtaattgctctagcagggacggcagtatacctagaatggggtactgcaattccaaggtatgttattgaacgaaagtatcagagagaagacttgactgattaatctggctgtatagaaatggaggcgagaagaactacctcgaatacgtttataccaagcccaagttcctggccactgccatgttcgccgcctatgcagtattactcggatgggctgcaagtaacagcgttgttttcggtcaatatatcctcaacgcagcagaagttgaggttggacgatggaaccagcgtggagttggcatggcctgcctcactgccgcctttcttatccattccgttgccctgaaatggggtattcggcttcagaatgcgcttggtgttatcaagttgattgtcgtcgtgtttatcattgtttctggttgggcggcacttggtggccatacaaaggctgagacgccgcataacttcaaaaatgcgtttgaaggcaccaagggaagtggatatggcattgtcatgtcgttgtacaacgttatctggtcctttattggctattcaaatgccaactatgtaagaacatgaacatatgagttgcgtctagatcacattgctaattacatttacaggccttgagcgagacaaagaacccaacccgtaccttgaagattgcagcccctgttgctatcatatctgttggcattttgtatatgtttgtcaacatcgcctattttgccgctgtatcgaaagaagaaatgctcgggtctggcagcattgtcgccgctgtgttcttcaggaacatgttcggcaaacaggccgaaagagctatgtcggtcttggtggctctctctgcctttggcaatgtgttgtccgtcatcttctcacaagggcgaagtatgtattctcacattcacatttgaacggtatactaatacgacttcgataacagttgtccaagagctcggccgtgaaggtgttttgcccttttccaagatctgggccagcaactggcctttccactcgccagccgctggcttgcttgaacactatatcgtctcggtcattatcatgctcgccccccctcccggtgacgcatacaacttcctcctcaagtatgtgatttctgaagacaccgcaagatcaatactgaccaattctcccagtctcatctcttaccccctttccattgtcaacttcttcgtggccgctggtctcgttcatatctacctcaccaaagagaagaactaccccaactggaagcccggtattcgtgctacactaccagtcaccatcttcttcatgctgtcaaacctgtatctcgcggttgcgccatatgtgcccccaagcgatggccaaaatgtgtacgaacagctaccttactacctgcactgtgtggtagcccttgcgcttttcgcagcaggagcaatctactacgttgtctgggcggtgttgttgcctcggattggtaagtatgtgcttgtcaaggagtccgtcgtggatgcggatggttggtctcgaagtgttttcacacgactaccacaggcagaggcagtgcgttcttagggatactgggtgtgagataaaattgggttgcttgattttggatttatgtgcttgggagatatattttgtcatggtgacttttcaccagaccttactagtaataggtaatagcagaatagaaccattctttcttcacaacacctcattaccaactgctctgtcatgctgtgacatcagaacaatgaaccgcggtgctgtatgttccagtcttctatggtagcccacccaagagaatcaattgaaactgtcatgagcccctcaaacttgctggtatattgtcttgcaaaataacagcataaaagccatttccaatcagttgtctgtcatatagaaatgagacatccactgggtgaatttgcgtgatgaaggaaagaaaagaagaagaagaaaaaaaagaacaaaaagcacaagatccactggcattgaccgccttcgcatctgccggactctgatctcatgtttttctttctttttggtgacggttggtctcaagtccgtggttcaattgatctcacatttggttctatttaattatttaatactaataccctttactcttctctttctttcctttttctcccggtattcgggttcgtggagctgatgcgccgcttctccacgcgtgtgctgctgcagcaagcaaagccaccgcttctttccgccagatctcccctccccctctttgtttccgctcgttctcctcaagcttcgattcctagatcaatcacccaacgccgctctccttcgccgctatcacagaccgccaaacgatactgttcctaccgcagaatgtgtagctcacgccgcgagacctccgggtcaaccaacgtcaagggcggccgtgaggtcctacctacaaacgtcaagccccagcattatgatttaacactagagcccgactttgagaagttcacatacgagggagcagtcactatcgagtacgtcatttatgtataatgcatactgtggtgcatagttttatatgttactaacatctacatctagcctggatgtgaccgaagacaccgatttcatcaccctcaattccaaccagatcgaaattcatagcgcaattgtctcatccaagggctcagtcgtagactccaagcccgaaatttccttcaacgaggatgaccagaccgcaaccatcaagttcggccaggctatcgctgcggggtcggatgcccagttgaagctcaccttcactggtatcctcaatgataacatggccggattctatcgatcatcatacaaggagaatggcgagactaagtacattgcatcatctcagatggagcccacggatgcccgtcgggccttcccttgtttcgacgagcctgccctcaaagccaagttcactgtgaccttggtcgcagataagagcctaacctgtttgagcaatatggatgttgatactgagaccgaggtccagggtggtgcgaagaaggctgtgaaattcaccacttcgcccctcatgtctacctatctcgttgcttttattgtcggaaagctcaaccacattgagacaaagaacttccgcgtccccatccgtgtttacgccacccccgaccaggatattgagcacggccgtttctcgttggagctggctgccaagactctagccttctacgagaaggcatttgacagtgattttcctctgccaaagatggacatggtcgccgtgcctgatttcagcgcgggagccatggagaactggggtctgatcacataccgtattgttgatgtattgctggacgagaagaacagtggcgcctctcgaaaggagcgcatcgctgagaccgtccagcacgagttggcccaccagtggtttggaaacttggtcaccatggacttctgggatggactgtggctcaacgagggttttgctacctggatgtcatggtactcttgcaacgccttctacccagagtggaaggtttggcagacttacgttatcgacaacttgcaaagtgctctttcgcttgactcgttgcgcagcagccaccccattgaggtgcctgtcaagcgtgccgatgagatcaaccagatattcgatgctatctcctactctaagggttccgctgtcctgcgcatgatctccaagtacctgggcgaagatgtcttcctccaaggtgtccgcaactacatcaagaagcacgcctacggtaacacggagaccggtgatctgtggtctgctcttgctgatgctagcggaaaacccgtgcagtcggtcatggatatctggaccaagaatgttggcttccctgtcctcagtgttacagaaaacaaggaaacttcttctattcacgtgaagcaaaaccgtttcctgcgtaccggtgacgttcgtccagaggaagatcagaccctcttccctgtcatgcttggtctgcgtacggacaagggtattgatgaagacactatgctgactgagcgcgagcgtgacttccccgttcctgacctggacttcttcaagctcaacgctgatcactctgccatcttccgcacatcatacagccccgagcgtcttaagaagctcggccaggctgctcgtgacggccgtctgagtgtcgaggaccgtgccggcatgattgccgactcgggtgccctggcagcttctggtttccagcgtacctctggtatgctttccttgctccagggcctcgatactgagtctgagtttgtcgtttggaacgagatcttgacccgtatcggcaccctgcgtgctgcttggctattcgaggacgataagacaaaggacgccctcaaggccttccagcgctcgctggttgcccccaaggcccacgaaatcggctgggagttccccgagaacgacgatcacattttgcaacagttcaaagcgctcatgttcggctctgccggtatggctgaggacccgactgtggtcaaggccgccttggacatgttcacccgcttcgctgctggcgacctctccgccatccaccccaacatccgtggtagtgttttcaccattgcgctgaagcacggtggtctcaaggagtacgaagtggtcctagatcggtctcgccatgcccagacttcggacgagaaggtcaccgccctgcgctgcctaggtgcctccgaagaccccgagcttatccaacgtactcttggccttgccatgagcgaggaggtcaagagccaggatatttatatgcctcttggcggtctccgcagccatccggctggtgtcgatagccgctggaactggctcaagtctaactgggatgagatctacaagcgtcttcctcccggtctcggcatgctgggcactgttgtccagctgaccactgccagtttctgcaccgaggcgcagttgaaggacgttgaacagttcttcgcctctaaggacactaaggtaagtgacttcaccaaggtttcacctgggttttctatccttgtaatatttactaatttgaatttttcttgcagggcttcgaccgcgctgttgagcagagcctcgactctatccgcgccaagattaactggctcaagcgtgaccgcgacgatgttgagcagtggctaagcagcaacagctatctccagagcaagctgtaagtctataaaaaagtggctgaacaatgttcataaatattttggatacacggggattctttgttttccagcgttagcagctcgaacttgccttctactgcacattatctctacgttgtcacctacggaaagcacgcgggatgtgcttctttgagctaaaatcatactccactcaattatttcatatcttgtagagtaagtgcttgtatggactacggctagctaggcaagccttgattggaatgactaactgcatggtatttggcaaccggcgccactagttagtgatgacatagaagcctccgagatcatgttgattgctaacaaaacaccccatagcgggggaaaaaacaggtggtatcgatggaaaataatacagaaaaaagagagaaatggcagagaggcctacgcccaccctccctttcctccgaacccagaactgtcctcgatcttcttcccgccaggaccgcgtgagggcttggactgcgccgcttcgtgcttgcgcagttcctcggggacacgcgatatgggtgacttgatcagcatttgtttgagatcgtacctgcataagcattagtaaatcaagaccgcaaccagatgttaaacggagaggaacgggtgtaacatacatgacatcgctatcctcgctgcccaggaaggtgatagcaacaccactctttccagcacgaccagtacgaccgacacgatgagtgtagctttcgatcgaagtcgccatgttgaagttaacgaccagtgacacatccgggacatcgatacctcttcctgcgaggtcagttgcgacgagaacgtctgttgagccgttgcgcacggaagcgagcgcggcttcacgctggtcttgggttttggaaccgtgtaaagtaaccgaggagaaaccccattgtttgatttcgcgagcgatagcgtcacagtttcgcttgatgttgacgaacacgataatcggtggacggaactcgcctgatgagaggatttcgccgaggcgcttcttgcgtttgtcttcgccggagatcatctccacacgctgctcaactgtgtcgacggcttcaccaacgccaccgatggtgataatggctggtcggcggaggtacttacgagcaatgcgctcgactgcggcaggcatagtggctgtgtacatcatggtctggcggtactggtgttggctcattgcagctgaattctcagcttcctctgtatcaggcttttcgttcgtgacggggagggcatccaggatcttgttgacaggctcttcgaacccaagatcgatcatacgatctgcttcatccataatcacgtagcagcactgactgaggactagcatgcgacgctcgatacagtcaactagacgaccaggagtggcaatgataatttcggcgccatcgcgcaggctgaatgcttgctcttcaagcgagtgaccaccgacaatactgaccacgttgaaaccaaggggttgtgtaaacttcttggcttcgatctcgatctgctgcgccaattcacgtgtgggtgctagaacaatagcgtatggaccgtcgtttttgcgccactcattctcgtcaagacgcggtagcgccgagatgtagactaaaagtgggaggaggaatgcagcggttttaccggaacctgtcacggccacaccaatcaggtcacgcgactgcatggcgatggggattgccgcgcgctgaatggctgttgggtccttatatccgacacggtcaataagctccaacaagcgctttggcaatggactctcttcccacgaacgcatgggattgggtacgctgccgcctttggtggcaatgttgaaatcctccttgaaaatacgccagtctcgctcacgcatgaggtccaagcgcttctcactccaatgcttgtcaatctgcgtgcgggtactatcctcgcgtcgccggcgttccatctccagcatttgtttggctcgcgcgctaccagcttcgtgatcgcggctcaccagtgcctctgcgtatttgcgcgcaacctcatcggcgacatcgtcaccaaagcctgccaaacgccctcggccaaagaagttggcttcctgtcggcgctggtatagggggttatagtctccgcttgtgtcttcctcggtgttccattcaaagttgaactttcggtctgcagtacgcttgcgcttcttctttgccgagaagttagatgtctggtcggctcccatgtatcggtgcttagtcaatgtagctagtgctgccgcttcgtcttcttccgtcagacgcttttcgcctttagtcttagatgggggtggcggcatatcctggtcgcgattgtgttgattgtgctgacggcctccctttcgcataccaccaggtccagttggatgttcgtcacgcatcgctcgcggcccggtggggacatgacggaccactggttcatcccgcacattgcgaggctcttggcgcctcacagacgatggtgcagatatgagaccgttgcgatcagcgccgttggtgcgagccttggcttgccgctctgcctcaacctcttgagcccgtttctccagagcgattttctctcgttgagctttagacaagaatttaggctacaagaagatgtaaatgtgagtaaaaggcacggaatcttgcgtcatgtatcatcatcggaagaggacaggcttacttttgcagttgccgcatctgcttctttcttcttgcgtatcaagtcctccacactcagtggagtgacagccggtttctttgcgccccatcctagcttttgcttcttctgggtatcagctggaggcgggggtggcacatcatcgggaggaggtggaggagcgatgctgtctggcggcggtggaggagcggttaaatcttctggaggaggcggaggcgggctgggcaggcgctccactgagggagggcgtggagggaatccctcggcgccgttggtcatgacttgaatatgcaagagaagtgatggctaaggaaactagagacggaatttctatggaatacgataagagctagacgcgtagtcacgtgtgcatgatcacgtgcatatctactatagactccgatagagtacggagtaggtaagatggctatattctttctacgccgccagcctatataccccgagtagggcgcacgtgtgatgcgcgttatagtatatgacattctctactggcagaagtaaagcgtgtctggggccttgggatgcaaatcccactgaaatatgactctacggagtacggagtacggagtacgtggtgcagtgcagagaaaagcaggagcctagttgtcaagtaaagttctagagagagagagcctagtcagatcatcaccccaaaaatgagaagcaagttgtgagatgtttgtgcactaggagattgtatactatggtgaaccgtcctggatggttggtatttttgtgtcgttctcgtcttacctgcataaccaggctgcccatcgtgcatttccctcttcaatggctacattattagaaaggggtagaaaggattatacatgctcaaccacaatatactggaacgatctagttgttgtgcgtaagtctaacaaggctaagacaatcgtagacgaatcaattgaaaacagtttaaatgaatttcattggaaaacaagccaccttagaatacaattggtcccgaaggatccaaatctcagatcggcaaatcttatgtcaagccccaagaagggacaagacaccagtgcatctaacgaaagtgagaagaagctgtctttaagcgggggcaatatcgctagagaacaggagggaggaaaagttgcccagcacgggcaacggggatgatactacatgaaaaaagaactcacccacccaggtcaatatgccagggtaagaaacgaagataaaacaccgaaaaggcaccagcagaacttccataaacgcacccattcgtgaagaaacgtatccatagttgcagtcattggcttgagggacgtgcatatgactgttgggtttcaagcggcaccgccgttcgctgctgtctgttggtagtaggcatacgcctgtgcagccgcggcatcaggtgtgggctgcatctgaggaatcgaagcaaactgtccctctgcaggggtggggtgcaccgccacattcccgccagtccgaacagaagccacggatgaaggaccgtagatttctcgatccagggccaggtattccttcgcggcatccttggtgcctctttcgagaaggtaattcatgtaaatttgcacaagttccttgacagagtcgacttgcagaacgctcttggaccggatgtcggcaatgacctgcttgatacgttcatactgaaccgactcggtagccgcgctggtgggttgctcaatctcgaagacgagatagcttccccaaaagggtcggctgtcgaggtagtattgctgattctcgtggaaaacattgcgcgcctcgtcaggactgcccttgatcttccacaaaagccgggcccattcggcaacgagagcagcctttgtagccatttcacactctggcgaatccaattgtgtcttgtagacttcaatggccgcctcaagacctccgtggcgacgacacagatttgcgagtgagataatcgtctcaacatggctggggagatacataagaatagcgttgtggatatctttcgccacgtccacgcggtctgacacctcttcgaagtaggcatagtggagtcgaatcgtgggattggcaattgggacgtagagatacgcggcacgctgatatatgattcgaacctcttcctccttgtcaggctgagcagccatccagcgagcgtatcggaaccagaactcgtcgtaataggcacaagtgaccaggcaccgctcatacaggaattgagttcgggagtacaaaccctcgccttcctcaaagtcaagatacttcttccagttcgtcagctgagcttgatcgagctcagtgacatggaaatagggacgcttaatttccgattcgaaagtccaacgcctggtcgtctcagcctgagtgtgcgcgaaaacctccaggtggtaattgttcacgcgcgctgtaagagctttcgtcatctcttcttcagtacaggggccagcagcttcgatctcagcgcggaaagcggcgatggtctctgccgaggcgcgctcggccaaagggctaccctgcgcgatttgacggtaccgctcaaagtagcgagaatattggtgcataggaatatgaatgacacgtgcaagaattgcgaaaatcttatcgtgggcctcaagccgctcctcgaactcaatgtacttatcccagaagggatgggacaggaaatcaagaccgacactgctcgcacctcgttcgaaaagcctagttgatattaggttagcatgatgtggacacatgtgcctgatgggtgggaaaggagtgataggagtgatagaggtgataggagacaggggaaacatgagcagtgaactctgtccgtttgaaaacccaagtaatcaaatgagtgcggtagatgaagctaagggataggtgggcatcctgtgctccgtaaagggccatcgaacgagactattcattgccattcaatgcaaggtcgtaatttggtcaatcagaggagatatgcagcctgggtgagctatgggtgagaagtaaactccacttagatcaaagaagcaaagcagcgagtggtttctcacccatcgacaatgagaccgactggatattcagatatccagaaaaaaatatgtgaccggcatcacgagaactttcgcgagctgcgtcggtaacggttatagggaaagggaagaagaccatctctactctcacttactctcgaattatatcggggtcgtgcgaagtttccgccttgaacgaacagtagttcgtccagagatcaacagagggcgagatactagcaatgcctcgttcataaacctagggcgacaggattagtacaaagccatggaaaagaagaggctggcgcccagggagggtgtatgcataccatctcagcggcctcagtgccggtgagagagaactcttggtcggcatacttcttccagtatccaaagagcaatgggaacttggcaaggaaccggtcgtaggctgcgcgaacggttgtgatggcctgggggctggaattgcgcgttattccaccctcgagggcctccgcggcgcgaatcagtttttcccaagtttcgaagttgtcaggatcatcaagctgtaaaagatagacatgtcagtcgacaaggaacatgttcgtcaaatgccacatggaacacgtaccagctgggtctcgagatttctaatctccgcattctcctcttcggagcctccgtactgatagtcggccatggtcgtccagtgctgaggatgcgcgcgagaagttgatacctcggtataagacaatatggatggatgagcttgcaggtactaataagatagcagtgatggtaacaatgaagattgcgaaaggaagaaattcttggggttgagacgagacagacaagcgatagcaggtcctgatttatgcctgaggcgaaatatctttggcccgtcctggtccagggatttgagggcggtatagtccatggcgatgtggcagaaatacccgtcgacgccttcgggataaggcgcaaagaccactttatgccttgtcgcctgacaagcttggcgtgagcccgggcggtatcaactttttgaccggaacattcacaagcaacctagaaccacccgtgcacactaggatcacaaaccatcttgatccactatgtcggtttcgaagcagacgggcacattgttggaaaaccttcctcaacgcctggtaaatttcttcgctcggtatcctccacaaacccactccgcagctgtccgccgtcctgcccctgcgaacggagagggctatgtaccaatgaaggtagaatccccttacacaccagatcgcgatgccaagggtgcaccaggagagaaaaagcatggctggactccttcacgagcactcctcgtgaccagcaacgatgtccggaatccatttcttccacacaagcgattcggcaaatgggaagcaccgaaatatggactgcgccagcaagccgatctgatgaagctggccatcaagtacaatgtgggggcacttcttcctcctagtcgcaaatcacctgaattcaaggagacacgacgtgcagagcgtggtttgcaggtcaagggaactggtgttggccataaggtcaagggtcacaagtgggagcgcaccatggagtcacgtctcgaggatcgtcgcaaggcgatggaggcaatgccggagatggtcaggatgtggaagcaggttagttctctattggtccttcctgaagtggttagagcaatgctgactcggcgcaacagagaggtcatggccgcggctggagacaatggcccaagcggtaatgtggatgccccaccgccatccaccgtcgcatcgtcttctttcccttctttattttggccagtttgttcattctggcttttcaatgctctgtcgattccaacgcgaaccggatcggcacaaatacttgtaccagccatagcaggagcttgggacggagttttgtctttgaagtatactatcaaccccatctgtacaatacaatctacggtcacatcgcccaatggtacccaagaaaatcatttacatgaatccggccggtgttatctttcatcatcctcaacaccaataagaaaactcctagctgaatagtcatgttcagcttgcgagcacaagcagcagaacgggatgaaccccaagaacaaatagtcaataatagtatactatagtgcaccctacgaaggtcaccatgatgctgatcagttcagccccagttcagccttagaaacaagttagaacactacagtggcgctgttacagctttttcagcttttctttcacaattacaagattgatggtctactccgtacagcgttagcacttgactcacacgtactgacatagattgtttagtgtcattcgctcaacccatggctacgtgtttccagcccaatgtatcatcagtgaaattaggcacactgttcgtatataaatagtaataaacttgagtgggtaagctggcattgtgatgagactaaatgtagtgctttagctttagtaggatcctagacacccatgcaggttgggttgcaaatcgtgcatctaggacgctattggaacctgtgaggtataagttataatgatcaaataagttctcacaggcataggcaaatggttggttggaagtctatagcgatcaataatgtgattgtgtatcataatgtgggggcgtctaatcattagttccaatagtacatactcatgaacgtgtcggctgattcaaacatgtctccccgatgaggatgtccgtgactgtaaagggtctagtgaccctgatattatgcatagagtgcatgagcatcacaatgtagttagtggagtcgctgtagatcatcgtgtatatagtgtagaatagtgcgtgtggtatagtgacaacaatggccggcacgataaggcgctatgacaaagcaactattgccacgtccaatatatcacgggctacgtgcgaggggaatctcatctcgagcattcttcgtcacttcacatcacgccttgaaaacttgaaaacaacttataaaagccatatacctgactcttggaatgtccttattttctaaacctccgatagcctatctctttatagtggactggagatcatacccaggctagttgatttgttggtatcggtaacctccgatgagaatatagctactgctatcttatatgtggtaaggtctccccacctccttcttcaaatccatttgatattactcatttacacaactatgcgatctatttctggatcttccagatatccattatgctgattgtgctgattgtactgctagacaggaagtcccttctttcacaatttgccaccttgatttcaaacaaagtacgaagtacaacagacgttgaagtgcgtctgtccaaagttgaacttcaacaatggtggaatcaacctttcaggggtctatccattcaaactatagtcaaggttactccgccgatgtggacatcattcgagaccaggagtatcctttacttaatggtataagtgtccgtctgctatcactctattcatgctgaccactgttctactaggaacaacatacctagattatgctgggacaacaccctacgccaagtccatgatcgagtctttctcgcgtgatcttacatctaatctttttggaaaccctcattcgatgtctttgtcgtcgcagctttctacacaaagaacagaagacatccgagtccgcgtattgcgtttcttcaatgcggacccggatgagttcgaccttgtctttgtggcaaacgcaactgctggcatcaagctagttgcagactcactccgggactccgaccatcgaggattttggtatggctaccacatcgatgctcataccagtctcattggggtacgagagttggccgagatgggctaccagtgtttccaaaatgatgacgagatggagactgagatttcaaagctggctggtaaccagtccaaggcgcccagactccttgcctacccagcccaatccaatatgaacggccggcgtctgcctattcgatggtgcgagcaagtccgagccgcggcaaacgaaagtggagggaatgtatacaccctgcttgacgctgcgtcgctggtatccaccgctccacttgatctgggtccgtcttcatctgccccagacttcactgtcctcagcttttacaaaatctttgggtttcccgatttgggtgctttgattgtccgcaaaagtgctgcgcgggtctttgagcgacggaagttttttggcggaggcaccgtcgacatggtcctggccactggcgtgcaatggcatgcgaaaaaagaaacatctattcatgagcggctagaggatggtactcttccgtttcacaatatcatagctctggacacagccttagatacgcacgaacgcttattcggctcgatggcgaacatttcggcacatactgggttcctcgcaaaacaagtctatgataggctttcttcattggcacatttcaatgagaaaaaagtctgccaaatttatcaatcgcacacctcggcatatggcaacccgcatacccaaggtccgattattgcattcaatctttgcaatagtcgcggtgaatgggttcctaaaaccgaggtggaaaaattggctacggtgcaagatctgcagatacgcactgggtccgtttgtaatcctgggggaactgcctcgtcacttgggtggactggaccggagcttcgccggcattactctgcgggattacgttgtggtgataaccatgatgttcttggagggcgaccaacaggaattttgcgtgtcagtatcggtgccacgacaaatatgaaggatatagactccttgatcaacttcatagaggagttctatgtggagaagattccacccatagtcgccctggatcctctggtcgaagacgatggggtcgttgctcctcatttttatgttgaaagcttagcagtattcccaatcaagagttgcggtgctttcaagatacccgaggggaaacgttgggaagtgaagaaagagggcctagcttgggatagagaatggtgtttgattcatcaagggactggtgcagccctgagtcagaaaaggtatgcgtatccaagcaaaagcatccaaatttataaactaatgatagtagatttcctcgcatgtgtcttctacgaccctcaattgatattgaaagaggagttctccgtattacttgtggtgcagtcgcggcgtcagatcaggtcagccttgagatttcacttggctgggaggacacaagtctcatctccacatccttctgtccgagctcgaccaaaaaatccacaatagtctgcggcgaccgagtttctctccatgcctacacatccccggtggtctcggcattcttctcagacttcctgggcgtgccctgtactctcgcaagattccctacaaagaccaccaaccgctattcacagatgcaacggacgcctaatacatggaagaaccgtttccgcaagctgatcatgccaggctcattcccacctgacttccctcctccggtacttgagggtggtcagagactaatcacgttatccaacgagtcgccaattctaattgtctcgcgttcatctgtcaaccgactgaatgagatcatcaaagcaaacgccaagaatggcaacaataagactgttgccgcggacgtcttccggggtaacattgtcgttgctgaacgacttgctcgccgtggggacgtggaacaaccatatgcggaggaccggtggtcatctcttcgaattggaccagatcaacttcggttcgatgctctcgatgcatgcgagcgttgtcaaatgatttgtatagatcagttcaccggtgtccgacgcgctgagccgttttcaacgcttgccaagacgcgaaacatcgatgggaaggtcaaatttggcagatattccgcactttctccagaagaactagagggctttgactcggaactaccagatcgcaggacggtgatggtaggggatgtcgttgtgcccttatatcaggatgactgagtattcgaatgctcgttttcggcattatgtgatttcggctcgtatttctttttggacttgggtgtttgatatgccattatataataatatgtaccttgtatacagctgtacgtatctcttcgcttattattttcgggaggtttgtcaatatatagaagtcttggcttcttaatctggtattcaacagttgcctagtaaacattttgaatttgatgaacgccatagtgatacccatgatagtacctaaacaaccacagtcgcagtagccttttctggggctttggtgaaaggcgccgcaaagccataggtctggtaacctttggaataatccttgccggcctcacgctctagaagatatatatcagcaactcggcccttaaacatttgacattccaaagaaaactcaccatgctcaggcgggaacatctccatgcgatgcttgtagtattgctcccgaagatcctccccgtcactcctcgagtgaaaggtagcataaaggctcgatcgactcttatcggtcttgttctcagcagagcgatgggcgagatgcgacccaaagatcagcatatcacccatttcaagtggaataggagtccatgggtgcgagtgctcccattcaggcttgattcgaccacctgccgcaaattcaatttgcattttgtgggacccgggcacaacctccagacatccgttttcaggcgtcgcagcgtcaatggctatgttggcggtgacatgttcaatgcgaccgatgtggtcgtaggctggtgcatcgaggtgcgcctggaagccgtttccctgtggctgcttgtagttgatcttctccttgaagagcaacatatcctacagttaatagcttgatgttagtatgatctcctgatagagcttcggtcttgtggaaatgaacatacatcgcctgagactgccttcagaatctccgccagctgctcgccgcagactagtgacttgaactgagggtggtattcaatgaacctttccgtgcgcatcagctggcgttcgcccttgatgttgatttcatcgtaaggcatccatttgcccttgacacgaggccaggcctggatttcttgagtccatcgcttgagttccgtaggatcaacgagtttatgctcgtcggcgcgtaggaggaggtaaccattctcatggtaaaaagctatttgttcaggtgtaagaggcgacatctttgagtaatttgttcgaaaccaccgaagtaggcagataatgagatgatcgaagtgagaatgcagtaaacctacgagcttttaatagtttttcgaaacgcatcgacttctgttgttcaacagcggggccattccgataattcggccttcgattgccctaggaattgacccgtgggccatttctcaattagttctagattgcgttggatgcgacttcagtgaaggtgttcgtcccgatgccaaccagaaacccatgggatgccgcacagaccaacgggcttcgtgccgagacgaatgcgattcgctcatccacgaatctttgagaatatcgtgagttattggaggggcaagtgagaagatcaccatgtgcacgtgctgagacggacttcgtgcctttattcgcgatttagcccaatgctacaaggacttctaatatgtcaccacaccctatgtacgaccaagggatctatttaagaccatcaacagaccatttcttgaggaataaccaaaagctttcatcaaaatgaacatgaaaatgactatttccaagaccgagcaacctctcaactcggtcgaggaacacactcgagcaacgatcaaaacattgttccaatttctgcatgcacagggccagggtgactacctcggcgagcaagtaactcaactggaacactcgctacagtgtgcatatcttgccacccattccccggagcatggaaacgaccctgaggtcatcgtggctgcacttttgcacgatgtcgggcgattcatccccgcggccgagaagatggagaaaatgatcactcccgacggccagtatctcggaagacaaagccatgaagctctgggggagttctacctgcgccagattggtttcagtgagaaggtgtgcaagctggttggtgcgcatgtaatggctaagcgctatttggtcgcgacggatcaatgctattatgatgcattgagtgagaccagtaagcggacattgaagttccaggtaggtcacctttcccttattacattctcaattttaggagtatactaatgacaattagggtggcgggtacaataacgagcagatccaggaggcgcaaaaggatcctctgcttgaggcaaagctttccgtcagacgatgggatgatctcgcgaaaaagccgaattggaaagtccctgatctggaagcctatgaggaaattgcctatcagtgtcttattggtgagtgtgattgcgatagcgacctctaacaacccaatatatatactaaacatatacagactcccggtcaaagttcaccctacattcgaaagaatatcacctgccaacacagcccacagtggtgatctgtgttgatggcttcgatccggaatacttgaagtctggtattgagagaggccttctgccgactttcaagaaattccttgacaacgggttccatgccactgctaagagttgcatgccctcattcaccaacccgaacaatgtatccatcattacaggcgtgccaccctccatacatggaattgccggaaacttcttcttggaccgagaaacaggcgagaccaagatggtcaccgacgactccctacttcgtggctcaacaatactggagcagatgttccggcgtggtgtacgagtgtcagccatcaccgccaaagacaaactgcgcaaaatccttgcccacggcttaaagggagccatttgcttttcttcggaaaaggcagcggattgcactctggacgagaacgggatttccgatgtggaaaagtggctcggtcagcctgcgcctagccaatattcgggggatttgtctttgtttgtgcttgacgcaggcatcaaattgctgcaggagaagagatcggacattttgtacttgacattgtccgattacatccagcacaagtatgaacctggcagcaaggaggctgacaatttcatgggagcaattgacgagcgtttgcagagtcttgcagctctagctcctgtcatcggtgtaactggtgaccatggtatgagccaaaagtcaaatgagctgggagagcccaacgttctcttcctggaggaagttctcaatgccgagtttgggccgaatgcctctagggttatctgccccatcacggatccattcgttcgacaccatggtgcactcgggtcctttgtgcgcgtctatctcaaagacatcacgcaactcggatcgatgatttcattctgcgagtcactcccagatgtcgaggttgctctcagcggcgaagatgccgccccaagatatgatatgcctttggaccgggagggtgatattgtggttatttccaaaccgcatgccgtaattggcagctgcaaagcgaatcatgatctctcaaacttgaaagaccacccgttacggtcgcatggaggcctaagcgagcaagagatcccattgattatgtcaaagccggcaaacaatgggagcaaggctaaggcgaaggactggagaaactatgacgtttttgatcttgtgctcaactgggcaatctgatatttatctatctcgatgcccgagatcaaagaggaggttccatcgatgtattataatgtagccaccaatcgtcaatatcagggaagatagtttgaaaatcaaagcttgccatgttttccatccaaattgcatcaaagactgggggttgttcctgggcaggagacgtacgatacattgtttcgtgggctgtgtgagcggacatttggcatctactcgacaaacgttccaagccctcgctgatgaccacaaggagatggtgtttatgcatagactgagtgatatcccgaagggcagccacggtgtcagtgaccagtgaaaggatcttggtcgtatcaattctgaccatgaaggcatacttcgtagcaaccttgaggagaaagacaacggcgaaggcgagcatagtatcgaaatataaaggaagcccattcatgaatgatcgaaattcggcatcagaaacaatcatccgaagaattgacatagctgacaatacgccggaattggcgatctcctccaattcaggtgacatgtattgaggtgagctctctgatatcggtacgccacgaaaggcgtgtgagcaaaggtatagctttgcaaaatgatagtgaaaacccacgcccttttgcggatagttcccgacattctgatttgctttgaagctttcgctccaatctgcaaaccaggtatccaaagagatagaacatcgacgcagttggggcagagtctgcggtgcaataggggtatcaacatctaccccgaaggtgtcgaagactcgacccaggattgaccattccttgacctggctgattagtctagcatcatcttctgtggcgtgttcagtttctagtattcgactagccgactcaattataaacccttctctggacatcggaggtcgaccgtaggcgatcgaaaagtggtggtcgcatacatagacgagatagtatagtcgagcttgaagatagccatcgcggtctcctttgagggctttgtagataccactatgaagattaatgtccgatgcaatgcggacggctagttccattagctttaatccaccacaagattgcagccacatcacataccattcccgatcaaggcccaagaaagttcatgcaaccaaaacgcaccaacgcacaggccacggatgtcatcttcattcatatgccttgagaaagtttgggccgcgacaacgttcttgtattcaccgtagcaagtttcaaagagatgaccgagggaatgcgaatgcaaagcagccacggtacaaacagccgccgtcaatagtggggatgcgattcgaaccgagtccaaactaatatggtcgccaagaatacgatagagaaaatgatcaagtctgagatggtatgtttcgaacaacgaaacggcgtcgcgtagtaaaataagtcccgtagatatcaagtctggacgacgggaagttgatggattgtttggtagacctgcctttccactttctgagacgcaggaggctgggatagaagctgggccacctcggggatccattatcacttcccatgtctgcggtggctcatggtgctcatttggctgagacggttgacttgaggtggagatttcccccgcgataactttctcattaatagtctcaaccggtgggctcaaagaattatcttgtatttcgggcgcagcttgcacagtttgcaaagcttgaaactcgggcatgtcaactttggcagcaatctttgcaacagcctcttctagccgccgcatcttttgcaccacggcccctttccatctagatactgtcaggaaatgccaatgcaaacgattagtctgtacttacgtgacatcgtcttctagtaatgtctgcaagcttcggttcacgctacaagggagacctctcttcttgcaccgcgagcatggcatctgaccctcccccatatgacatttgacctttccctgtcagttacttgctttgtcatctacttcaagaggaccaaccttttgttttcgacatgctacacaagcagtaatcttgcgagtaatatcggggggctttcgatcgccgaatgattctcgcaaagcacttacgggcggcggagacggtagttcgatgtccataatgagtgcctgaattgaggttgccgcggagtgataatgttctcgactttgcagtgtttgcatcagatccgataaattcttacaaagcaccaaccagagttcagacaattcagcatgacctttccgcgtccgaataatgttgcgcacttcgcaccgaagatatacttacgggggaaacgggggaccagctggcgggataaggccggatccacgtggggtcgatgggaaatcctgactggcctcaccgcacggtctattttagctgtgtatcccccgtggcagcttgcacgttgctcattgcatcttgcgcttattcatgacgactgctatggccgataggaagtatatcgcagaaaagctaccggtggttctctccgagatgctaatgtcttggctatacctcctattatacgtgatgtgaaagaagtatataacatcaccattcgccaaattaacaatgtgtgcaacgcaagggaatcgcattttgtttcctcgatcacttctactctccttaacctcaagaatcatttgattcgttccaatggcatcgttcggagccaaattgaggtttgtagccactgcaggcgttggattcttcgcagatggctatcttaacctgacaattggacttggtgagtggcttcaattaatcaatgaggccgaagactaatgttacacagtggtcccaattctgggttacctatatttccaagatgacaaggtaccgtcagtcgacagcgacatcatgaaaggtggtctgagcctgggaatggtggttggccagcttctttttggaattctgagtgatgtttgtggtcgccacaccgtttacggcaaagaactcctcctcaccatatttggaaccctattggtagtcttgttgccttggaacgggatgtcggcccggtctgtgacggcatgggttgcaatttttcgtgtcgtgaccggagttggaattggtgctggtaagtctttttcctttggaatagaagcatggatctaactcgagaaagattatccattgtcttcatctttggcggcagaaaaatcaccgtttggctcccgtgctattcaagtgttgactgtcttttcgaatatcggcctcggcaatatttcagccagcattgtgtttctgatcttgctcaaggcattcaaaggggcgatagccaacaacataagccatctcgaatgggtctggcgtttgctattgggcattggaattgtgccagcgttgttcactctttatgcccggctaacgatcacggagacaacaccttacaagcaatgtgagagtgcctcggtcttgtgctttgaagatagctaatactgtttagatgtctgcgatgacgctgccgggcagaaacgcacattcaagaagcagtgggaagaatttcgcgagtacttcagtcactggcaacatgccaaagtgctgttcgcaacatcagcctcctggttcttgtagtaagttaggtggacttggaaaaaggaaaagccgcaaactaacgcacacagcgacatcgcatactacggtatcaatctcaaccagagcattatcctgacaagaatcggttatgccaagggagcaacaccatggatcaccctgtaccacaccgctgtgggcaatataatcatccaggtagcagggtatctccccggattctacgtcggaatattccttcctgattgcatcggtcgtgtgcgccaacaattctggaccagtatcatggtgtgtatactttatgccatatgggctggaatcagcacacagagcgcaaacaccccgacagctggcttgatgattatctttgccctctcgcagtttttaatgacggttggtcccaactgcacgacgttcctgcttcccgccgaagtgttcccaacacgtgttcgaggcacagcacacggcatatctgctgcttctggaaaatgcggtgcaattctaactgcatttgctttcggcactgttgaagatgcaatcggcttggagggcgtccttggtttgttctcggggatcatgctgctcactgctcttgtaaccttgctgatacccgagaccaagaatcatactcttgagggcattgagaacaatgggctctatagaacaagcggagctgtcaccgaccttccaaattctagttgtattacctatgtcaacgttgaagctgggaacggggaggcaaagaccagctttggagatgatcaagttaagaagttagctgtatagacaaatcaagtgactgtggtcctatatcaccgctataagaaaggaatgaatcggttcattatttcaagagcaaatcaatctcattgagctatcataggcatagaagaatggctatgaatacaagttgtactattcgtcctcgatggcctcgtggcctgtgacatgtcgtaagtatgcttttaaccagtcattcttgtgtttcgctgtatttcatccagtctctgtgcagcggcaccactgttgaagttggcaaagctgaacgttgagatagctttcttcaaatcaaagcaagagctccgtcacaaaattgaagtcttttagcccaagaacaaggtctccctcccctggacctaggggacgatcctggattacaacgaaggggaagaccatggggttcccatccataacatttggtattcccgcaaccggttttggtgttatattcacatgataggcacaataaggttgctgaagttatgccggctgtctggttagtagtggtatgtttggggtttgtgtctggagggaccagatgtaattccaagttagcgggcggggagcaccgcttagggccaactgccactgctcgaaagagatacagtcatccctaagaagaatgagaacgaccattctaatgtcgcccctagaatctgcgaaccatttccgtgtatcttagcgaagtcggccaagcgattccataacacccgtttcaataataagtatagggtagccaaagttttaaatcggccgagtgtaacgagaggggggtataaagccattatctgcttctttacccttcctaataccagatcggtaagttatcgatccgatctaagccgatccttccctagggatacctatggccttataataatcgcgatttatttcaacgaacttatctgtggcaatgtgatgttcgattctagggacgaccttgataaggccggtagagccctcccattgaaatcgaaatgcgattcccccaagaccgcggtggtcgcttgtgggtgcttcgattaccggtggtgacagaccgagcaccacaatcactggttgccgtgttgatgctcctcaaaccattcaaaaatgtgctgtgcctctagtcgcagtctcgtcagttctgaggagactacatgccctgcaggcaggtcagacattagtgtgggggcgggatccgacttcgtctgctcattttacgcctttgccgttagcaaagttaaaagaaaggggaggagatagttgaaaagacaggtaagaagacatgtaaaaagaccactcaaaagacacaacaaggccgcatgagcgattattccctgcgacagggagtatggttaccgacagccctgcctgtgagaaaggatgagagcaaggtccttcactgagagtagttgttagagaggagaacaagaaaattgaagatgttagggatgccttacatagctatagaggtggatccatggatcacatggccgcttagtcatcctactctggatccccactacaataacaatagttatgatcgttcattgtgaatagcaaaacatcccgtcttctccaagcgcccggacaagccgaacaattgatgaaaaggagttcgcgtcgatcgggggtagtgtaagcccaatgacactgtgcaacgaggcatgcgcaagcacaggggccaagtcgcgggatccaaaaataggaataatcaaagtgtttcctggacggaaactttcagagattaaactgaaaagaacagatactacacttgatctaagccaataggcaaagagagctgaagaagaaagaaaagaagaagagattctgggggcgcgggcgggtatatatacccaattttggtcacgtgcctttggttcaaggcggtatgtgtcttgggcagtacctattagttaatctggtctgctagctcattacagcaggcggtgatggccggtgaaattctgggggcagggacaccttcttatagttatcctgagggcggtcggcttctgccactatttacaaatgagacaaacagcgacatatgctcgcttaattaaacatgtaaagggtaacgtgatgataaccacaatcactgttgatatcagggtgatactatgcactgcacttgctatagacaatactataggcggtcaaacttgcaaaatgtcaactggcattggcgtgttttgattggctcgatagtctaccccgcctatgggcccgcttaatatggtgcatcacctgatgacctcagaaggattacctggatttcacatttcgtatattggcccttatctttaacctcaaattcccgaaaatttagacatggcagaccacttacattctcgcgaaggatctgatgcttccctcaacaatgcatcgattgcttctccacgatccagcaccgaatctcgctctcgaaatccacttcgcatttcagcaaaccaccagcatagacaaagcttgagcgagtcgcttcgcggcccgccaggttccccccgtgcacgccggcagccatcactcccacagtcggccatccagagccttatcgataatccaccgccacccaaggctagcaaccctgcctttgttggtcgtgattggagagagatatcagttggggagctggtcagcccgggcgacctgaagtttgtcgagcttgatacaggcattgaagaggcgacgaacgtgagtacatcacataggcagcattccctgtcctgactaacatgctcgtccaactagattttgattgattcaggtggcgctgtgctgttgattcgcgagacacccgagtccacttctgccgtgggcacattcgactatgccgatctcaattcctatctccttttagcagcgggcctgacacatccggacgaagcacatcaagcgtcatatgacgagctagccaagaaagcccacaacggcgtgcccattccattaagagatgtgaagaagttcggtatggagaaggagccgctgatcaagctgccagcgtcggccaatgtcttggccgcggttgagatctttggtggtggtgttcaccgggttgtggttgtcaatgagtcaaatgaccaagaagtggtcgggattttcagccagttccgactggtcaaattcctctgggaaaatcgccgcagtttcccgattattgaagagctctacccgagggctctgaatgagctagttattggatctcaggaagtgatctccatcaagtgagttgttttggtgatctttagcgctgtctaaccgctaattcgtaattctcagtggtgataaacccctctctgatgctctccatgtgatgaacaatgagggtatgtcctcgatcgcggtggttgataactacttgaacgtgcttgggaatatctccacggcggatgtcaaggtatgtgacgagccatcttaactggcaaagtttactcaccatttcgtagctcttgacccgatcatcttcattgccacttctgcataacacctgtacccactttatctcgattattctatctacacgggggttgattgagggtaaagactcattcccggtcttccacgtcaatcctggatcgacactcgctcacacagtcgcaaagatcgtggcaactcgatcgcatcggtaactactgcaaacttgagatataaacacaagatgtactgactgctttagactctgggtgaccgatccgttatctcccacctcatcaggaccgccaactccatcgcaatcttccgtacacctccctctttccaacagtatcagcccagctaccggaggtactgcaaattcagaatcttctgaagaagctgtgacatcttatgcacagccctctcaatatgccgcccctcacctaccacctcctaacccacccttcacgtacccagccgtggcggtctcagtgccatcacccatctcgcattctattccctcgtccgccctagacggagcccgagtgtccggacgcctcgccggagtggtcagcttgactgacatcctgaacctgcatgcccgagccagcgggctgaacccggccgacccggccgactctcgtagccgccgccgacgcagtagttcgtcgagccagagtgtccgccgcagcggtgacattggccgggagcttttcagtcgtggtggcatgtaagagcatacactacgttttaacttgggctctactgcaaagcatgttctcagtactgtatttgaacccgatatacgcaatcgctccgacgtgcttctgttaccaagcctaattctattcagcccaactagatatgcatatttccatgttgtcacacttcatcagccatacaagataggaggcaagcggatggacctttgaacgttgcctagcctgtcattatcgtctttagcaatggatattatttccattgtggatcagcattacaccaaacaacttgaattgactatctccctacgtagttcctcacttgcattgtagactcgaatctcgattatcacgtctgattcgagtccccgccataccagataaaccagatgagccagcatccatatcaagtcaggatcaacaatcatcgggaaaagccgaccaaacccacctctccacggcgatcaggcaaatcctccatcgtacggacaaagtcgaatactatccactaatcccatacccgccatcacccggagaaccatttccggaatccacaacgcagtcttattgtgtcccatccagaactgtccagcggcgcgaacaccaccacacacgcaatgcacaaccagcagcaacggagaagaccgagtccagaccggcgtgcttattggtcctcgtatgccgtcatttaaggcatttcgcattggattactgtgtttgattatgattcgggtacagacgtcgatcagctggaggtctcgaattatgagtggatcggatgtaagcgagggtgcattttccgcttctcactggcccgtcagatttgagctacccatcctgtctggaaggtgacaggtctggaatcgccggattgagggggcttggactaactagatggtgttgcttactgtttggttgagatattgataagtctcaagtatgcagcaccaaggaacagtgataccgatatctccttgtgagattacacgtcctacgataaaaccaaagccagggtctgtactaactcaagaaggaatgagcttagaccaaatcccgaagatcctcgactcgctaaaatctggggatgatgttctcccacttgtcgtggtggcaacaccacatccacagtcagctcttggtctcgtctggactcctggagccactgatgctccactgtgcaccgagagatccggactgggcgctgatcatggagacacaccctggggaatttccgggtaaattggggttgtgattcggggatattttaggactttctgttggttgagaaggactggaaggtatctgtctaggtgatttagagaggatgttgcatgatcatggccaggtccaggtctcaagttgacatgattcatagctgtccatgaggtacagtatggatatagtttagtaagaaatgactcaatccaactaattgcacacgacgatagcgccatcccaaacgaaccaatctagactccatgtctgattggcctcaacagaagaagaacattcagtcgctagaaatcacctcaaacgtagtacgtaagccgcaacaagagcgaacagacgaggcaagtccagaatgcccgactcacgaatcattccccccagagctatcacaccggggaggcgtctatcaccaacccatgggcctatcatctaccttggaagccaatccccccatcccaatctgacaatctgacaggccacccactggatccgcaagccaccaacccagcgtcaaacgcaagggaaaaagtaaccgccaatcatgctcccacacgtgtgcacgggccagcgttgcagtcccatccagctggaaaccgacagtaagcccgtgggtgggtgctggacctggccccgttgaagctgcacggagatcccccctttgctccaccaggcgagacgagttagagttctatttgctgggtgtgccgatgatacccatgtctcgaccgctggtacgcggccctcggacttgggtttcggccgtggtagaggtgctgattgactctatactatccatgggtcagtgcggacgctagtttgctgttggccaattaacgtccggacttggcttcaaggctgggcacagctgcaaccttaaccccgcaatctgggattctgcaggtgattcttttcttttcttttcttttttttttttggtcgtgtagtcggttacatactttgagggattgcgggtcttggatttgagatctgggtataggaaatatattcaagttgttctatctaccactcatagtacgtagatagcattgatatgggctgacaagacaaacgcatcaccctgataaaacagaagtagaaaacgataagtcgatcctgcacgatcgccgttgatccgtaatcccgggaacgcaggggcgggtaggacagcagccctggagccaattccgcagggcacggacactggcactggcacggggcacggagcacgggacacttggattttcaatttcaatttcagtttcaattcttcagcacgaaattcaaatcccacccgaggagctaataactccataactgcgcggaaaaatacaggatatttaactattaggccataccaaaaatcaacatattctaatcagagaccccatccgctctgtttcttgttttgacagaaacccgcggggtcggaaacactcctgagatagcacacggtaactgtgacgagacgcgagatcaaggaaattgcaatgacagagatagagaaagcaggattcccttttcaaaagtacctatttctatctagcatgcaaggcctggcctgagatatgctagataatggtccagggtccagggtgggaaacagggaatcggggatactgtattgtattgtaattttggtaataatggaagaattgctgccatgataagtgagtagtattaggatactgtatcacactctacgctagcacagttgtatgtactcctatatcccgtttaaccctattccatgaatagctggtcatgagtgacagcatagaaattaagtcgaggggttccacagttgaggatggtctgatcgctggaatgactttaggtacgtaggcgagaacctgggtgggtttgtgttggacccacgtagcagggctagaggattactacagagtaccaagggtgcggttggtggagttgggatgcggcattttcaagggagaaagtgcgtggacacaagagttaggatttagggaaagctaactaacaccagacgcaattctggttaaggataaacgccagaagtcattcctatgtaatgtgggactggggaaagctatagctacagctctactggcacggcccgacggagcatagagtctgggactaggtttatcgcagaaaagaaaatgagatgccaataatcgcgcagttataagggatggtggagtagccccggattaggatgcggacttggcgaggttgtttgcggatggatgcaacttaggtatagaattgggggaattagggaaattagggaaattttattatgaagaagatcagtggatggattttggctcatgtcacattgaagtatagtaaaggaaaatttatgaaaagaaagagcaatcgatacatacagacatcaaccctgactccagttcaggatattagatgtaagatacgagaagatataaaaaaaggtacagcaaatgtgcaaagccacccaatatacagacccaactccgaaagacccaagagaaaataagtacctaggtatcaggtatcatagatcataataggcatgatagacagatgaggttaacaagagacgctggtgaaatcatcaagagcgagaagatcgtcaaaagcaaaaggctgatcacggtcggaaagcggaacattcgagttacccaagtggaacgcaaactgactgaaatccgtgaaatcaggatccatctcctcatgggagagccatcactgttgaacttcgcaccgggcgacatcgtagcatgcgccgtcggcgacagcggggtgttgggagtgggacagaagtccggagtggactgagtgcccgctgagagggcctcgatcctgggagagctgagactggagggagccacctgcgagtgggaaaggttcgtggtctgagtaagcagattgagtttgtgcaagttgttcgatggatgggactggccgcgcgaatgaccgtgggtaggatggtggccagtggggcctgagatggatgctgagggaatcggtggagccgtgtgttgcagaggcaactctggtgcggacgcaaggcgatcccggaactgatgcatttgggtcgctgtgtcaggcatttgagcctgctgcatcatttgctgctgccacatctgcacggcctgcgcgtcggtgggcgtttgtgcaggggttgggttctgctgttgcatgggcgcccatgcgggtacttgggagttccagcccggtgcggaggcttgttggctcatgtaggctggcatctgcccagactggttgcctgtcggtgcagagaacatgtcggagtatggcgtctgggaaccgctcatgctggccatgtaggactgggcactcgggtcgtacgacgccgtaggtgataggacatagccatcacccgtgggcattgggcttgccattgagcctgggccctgggagaaggaggagcgaatattcgacagatccaagctcatcttccgtggaccgccattgactccattgagtgatggccgcggggtcatatggcttgctcggcggccgtggatagaggagttgttgaattgagcgcgtgctgcaaaggcggccagtagatggtttttgaactactcttcaatttgctcgttttggcgttgcagcatgagaatccgtttttcttgataccgctcatcgacctcttcatacatggcctctttctccacgatatccttggtgatgtgaaaggccttgcccgtgcgcttcttatgcaacatagaagcccggttggcagactccagccgagcatctaagctgcgatccttgcgccgtgaggcggcgataaaggctctggggaatggttagggtgcacgttcggcccctccgtgatacgagttacatacctctcctggttctcctcccgcgaacgggggataggcgtaatatcctggtcgagatctggcaggggcatcctggacatggtacctggtagaggaggtggatttatgcaggaaagagtgttatcgcctggccaccggagaagagggggacggtaagttaaataccaaaaaggctgaggggaaacccgtcagcgttaaacccaagctaagggccagaaccacggatccgagccgatcatagtttgggcgcttggaaaacttacggccgctcggtccatggttgccccgtccctctcctctaggctagtctgctcgagagcgccactacggaggagccaaatacgaatgggctagatatggtgccactcatggcccctcttcccggagactatttcctgcttttccaggtaaataatatgcagcataccagatgtgcagttagcaaattatttttcctttccagattagccctgaagggtctagaccattcgctgtgaagtggggcgttactctactccagacagatcccgatagatgtgttctgatagatgtgactctatcggggatcactgcagatcactttcctgaagcgtagactgtcatctccagggcgaaggttttttttttgagtgtcttcgacatcacgagaatcataccacgtgattggccggattaggaaggcttcaaaagaaacctgaaattcaaggctacacctaccttggagaacatcagatctatgataaggttacagtacttcggataacaccgattacttcttggcgagtataaggcaattgctattgaccgttgttattgacgcttgagaaggaaacacctggttcaggatctggatagtaccaagcgaaaattacgaggtttccgttgaatatgaagttctccctcttccttcctaaatggggacttccttggcgtatctcggcgcacctgcagggctaggcgggttgccttaggctctagggttcgcacatactactactactactactactactactactactactactacttctactactactactattactactactactcttactactactactcttactactactactcttactactacctgtactccgtactccgtacttacctagtaacgtagtcagcatttccaattagcgtagcgtaaccactatgtgaccctaatagccgccaatgcatcaactgccggcatactcccgaaagataactttctcaccagcaactcatataggaaggaggtcttaaatcaaccataattgggtacaaaatacctcgcttaagtcaattgtcgcgaggcgtagaatcatccatggatattagcacaaaccaaagtacgaaaggcataaaccaaacagtcataccagttaaacatcatacatgatgttccgagacatgccaattgatcagtcaattgatcaccgtcactagctgaaacatcctacacgacacaagatatgggcttattcaatccctgctcaccagagcatctcccgatccctattccttcttttggcctcggacatatgtattctgccggatctaccctcatctcatagacagcgacgccatatttaaagcccacggtatcgggggattcgccaccggtctaaagccgagttacctaagctcacccggccgagactaggccgcttcgagcccctccagatgtcctccccgatgtcgccactgcacgcacaatccgatatcatccgaccgcattatttctctacgcgaaagtcctcgaaagccctagtttgtctgactctgattggcatgacacttcacgaattggacttttatcgttagcgattaactacaacgtaactagtggggtactcggcgatcaccccgctgatcgtccgtatccatgtctaacggacagagtacaggatgtgtatgtacgtacacgtatccagatcatcgcgacaaagcacacatccatgcattggcatgaaatcaacatgggagatcggaattaaccctcaggatcaatagccaatccccagattccaccagaaggctagtcgagatctcggagaacgatcggggtcagaacctgctccataggaaccccacactagcagccacaatataaaccgacgacagctcatgccgcacacttccgccaggacgagtgggagggcgccgcgctgagatctgcaggcatacatgcctagaagggaatctgtggctggctatatcatggtggcggtggcgcgagcgctggagctatgcagggggaatctcggcggatttgattttctgtggtttcatggttttttctttgattcggggtgcatacgacggacgtgtttggcacatgggtttttagcgttagggttgattcttcaaggtcggtcttcggtggttactcggttaggaccgtaccgtcactctgggacacttgatgttgtaggacggagtatagcaaggacatcgtgctctcatggacgacagggattggttcattggtctgttcctactaccttcatatgtgcatcattgcgaacaatcagtaagtctaccaaaagcacatcgtcccctcgccacgaaagaaaaccattgcaaatgaaatcttgtttataaacagcatgaataggtaaaagacgctaagttctcaatgagtgcaaagccaagggaaaaggagagcaaacaaaggtagagaaggcccaaatcagccgatgctgctgcgcggattagaccattcaacggggtgaatgctagattgtccgctcaggcaaactctcatcagacagacctggagggaaacacaacagcagaataaagttatgggatcgccatggcttcttacgcgattcccagcggcggcaccatcccctgttcctctcgggcctcgcctccaagcttgtaagacaccttgaatcgaatcttgaccgagttgcccttcccagcatcaactccgtcaatgagcatctcctgttggacaccattttgctgctggggtgcaatatctcggcctgattgcggccgaagctgtagcgtgtaggactaattcatcgtcagcaaactcatccaaaactggactgcgttagtagcaaatagcttaccttctccacagcgacctggaaatggagatctccaatacgctgactagttgtgtttgaaaatatagctacaacgtggatctggcgtggctgcgtcggcacccggcgcgcagcgaagtcaacttggagctgagagttaaggacttgaatcttattggtcgatggaagcgcattgctcgctggcaatgcggatgcgaaatcccactcatcatcttccactggagcggcctgccgcggcggttgaggagacggactcgtgcctcccatcaggtcaagcaatgacgatggagcgggagcaggttggctttgcgccggtggttgaaagggaccagatgctgcccgtgggctagcagagacgagcgatgcaaatggatcagccgctggtggcggggtcgctctggactgggcttggggcgagacccccatgacgggcgtgggagattgagagacaggtcgcgaactgttcagagaagcaaggatatcataattgggtttgaaggctgttggcgcatgctgctgaggttgtgatggaacaggcggcgttgggcttgctggcatggacgcgaagttcactttaatattggtcagtgatggtgctttggggtatattgcgccgaggtacttactggaaggtccgagagagataccacctccgggggagggagtttgtccgcctaatgaaagaccgagtagatcattctccaaggagctcccaccgtgggatggcccggcctcgttaccgttggagctgggttcaggctccgggtcgaaatcgataagagagagctcgttgtttgcatttgttgaaactccagtcgtggtgcccagtgtacccttgggaatctgagatgcagcatccagatcacctttcttaactagcttataccgctcgattgtgcgatgtatgctgtcgttgatctccaatagcttgtggacggcctcgggatcatccgattcttcctcgcacattttctggattttggggtgagcgctttgcaaagcactcgcaagttcctggtacaatcgtcagagacctatcaaccggcaaacaacacacgggacgttttatcacctacctcgaaaacttcgccttctgggagaggttccccgggcttttgattctgcagcatctcttccagaatcttggctttttgttgcaccttaacaacctcctccgcagcctttgctcgataatcggttttatgccgattgtcgaatcctgccataaccttcatgagccggttcgcttcctgtagatcggcgggagtgcctctccgaatcaactcctggagtttggcagactgcgcttccctctcttcctcttccatctcatctgctgagcggaggttctagccaacgttaatttgactccgaaaataccatgtgggggccacatacatcacttggattcaagaccgcagcatcttctcgacggacctccgggaacatatatcccttataaagcaacagacggtgcatgtcccgaatgaagcctaggtcatccttatagcgcgatgtctggcagatagtctggcgccactcctcgatcgactccaaaatgcggtgttggaccctggagggccgtatgggtggccgctcggggaacctgcgaaccaattcattcagaaactcctttgtaccgatttggagatggaatggatatccgcagttcttgacggcaatatcgagtagctagaaaccgcggttgtcagtctcccccgcctcggctgtcacttgagctcacgtaccgccaacgccaacaatgcgacattctgattccgggaattgatgagatgaactatatccaatgcggcttctcgcggcctgagaagtgaatccatgagtgtgagccatacaacattgggtgtttcgcttacgcattgcctttcttggagttgattagatccgcaacttcaaggttcagggccaggttcggttcgtagttttgaggatcgcaggcatttcctgtagataagtctcagtatgaatcatttgtgccacatttatttcaacactgaactcacggattgcccgctgcaacggcgaagcgcctggctcagcgtagaccccgaagcggtccctggccgccattcgtgcagatgcagcctccaggatggcggtggacgaggaactaggagaggaagtgtattagccggataaagagggaggtactggaaagtacaagattctagaggagatgtgtacagtcgcgaacggggatgcgggcggagaacccgtttaggctgcacgtgtggcgcttgtgcttggccttgatcttttttttcaaccactacatttaccaccacggaatactccaagatactccaagcagagtatttgaaaatcctactagatttcgacctcgtcattcaccatggtccgccacaaaaaagataacttcgcgcgaggaggcaagaaattcaacaacccccgcccccgagtgccccgcggtgatgaagaagttgagggcgcaacctcctcaaggcctccttacaaggctgcctgctgggatatgggacactgtgatcctaagcgatgctcggggaagcgattgatgaggctcggtctaatgcgggagcttcacattggccagcggcaccccggcgtaatcgtctcgtatgtttcgcagtttcgcagtgcttttttggtcctcttagcttgcatgctgacgattgactagtccaaatgccaagcgaattatctctcccgcagacaaggatattatggagcagcacggtgctgccgtggtcgaatgctcttgggtgcgagtcaaggaagtgccctggtcacggattggcggaaaatgcgaacgacttcgtatgtgataagaattgggcaatgatgaactggattaatgggatgcttactatacatagttccctaccttatcgccgccaacacggttaactatggcaaaccatggcgtctgaactgcgtcgaagcgctcgccgcttgcttcgccatctgcggtcgcttagaatgggccgaagatctactcagacatttcagctatgggccaactttcttggaaattaatcaagaacttctggcgcgctatgccgcctgcgaaacagaagaggatgtgaagaggacggaagaggaatggctaaccaagatcgaacgggaatacgaagatagtcgcgtcgatggaggtgatgatgtttggactaaaggaaacactaatcgtctacccgcacgaactgatgaggacgacgacgacgaaagtggagacgaagatgacgaaaatgcgggcagtgacgaagaggaagatgaggacaaggatccatttgcgatttccgatgactccgaagacgaagagcaaatggccgagattcgtcgcaagattctcaattctaaagcgttcaaggatccggaagaggaggaaaggcagcagccggagaaaattactcggccggagcagctatatgtcgactcggatgctgagtccggctcagaaggaagcgaggacgaggcatttgacaatatcattaatgcgacgacggtcactgaccgcacgggaatcaaagcgattcagcagcggaaaggaagcgagactgtctctgcctcgttctctcgggcggagatttctgccccgaagaaatggtgaaagtgaggcttattgtacatcaattgcccatccactcaacgggccgttagcttcttgctctgagagctagcaccattttctggagtctcttggtggtttctcccctggcaacacacatagacagctttattgctttgcgagtcctgccatagcaagtgcacttgattcttcaaattgagtccggcattctgctgtgtagtattgccacttgctatctcgtcattggggtggtttcatttctctgaaggtacgcctcggtcaattcacgggatcaccaagtttccttttacgcgacctacgcaactacatccgctccttcaaatactatgtgttatgactcattacaacgatatctgctttactttgtactcggcgagcgacggactatatccaccggaaagggaaaagaaccaattatcatccatggatggcacatatcaaattcactattttcttccaaggttggtttagttcctaaaatcatagtgtgtggtctcaaaggacatagtcgtgccttccgggccaaattcggaatcggagcaagatcaccaatataaccttgcaagaccgaaattaccacacttaagactcacaagaacttgtcaactcacttaaacaaatccaataatagttctcactcactggagccacacctgtccaccaaacactgaacccagcccatatcgacgaactaaatgcgacggccaccctcgagctcaacgggcaaacagaaagatggcacggaaaaagaacagcatgaaccgcttactacccaaagagccgaaatggacagaatccgcagttaatccgcaatgcatgattaatgactttgggatatcgagggaacccacgccatcgcagcaggacaacacgattaagaagtacgaggaacaaaacatacagctaagacgtgagatgaaggaacgggggaataccatcaacaaccttgtacgacaccacaaagaaaccgtgagccagtttgaatataacatggcaaggatggcaaaccagctccagaaacaggcaaagatgatcgccgaccttgagtggcagaaaggaatgctgcttcggaatctcgaggaacagaccagaatatcatatgcgctaggacagcaagatacgaagacgagggaagtcttcggtaacatttccagcacgatgttcttagaattcgataaacagacaggcataattgacgaaaaaacgagcgctatcctcaaacttgaagcacagaaacaaaaatcgctagcgatcttgagctacaaaatggaaagatggctttggtgcttgaatatctcacaaggaacagtgaagaatgtgcctctctctgggactaggacagaagaggagaagatgtacctgatgataaaggcagtattgaatgcctgtggggagagcgatactaatggaatgagccgaaccagtcgtttcctgaagaatataagacttgtcaaatgcgaatctcgtgtcacggagggaccccggagtaaaccaacatgtttattctgatcctatcgtctcggcctaatgccggtatgatatagaaccgaccacaggcaatcgaatcgaacaaagatggaggatttgcagttcaacaaagaattacattaaacatccacgtcactgtttgctacccagcctaaccattttgcaatcatgttataccccaaattaagattccaagcgcagatccttctcactgacgttgctttccgcagaaactgacgctatggtgccgatgacatcgcgggcaatcgacagcatgatgtttgggccaagaatgcgttaacgagtgtgaagaagtatggcagatgaacgggtttgtgtctgtgtaaaccggacgaatgggagctcgactaggtcgatacttccgacggggagtgtatctaagagcgtttcgatggtgagatgaggaggagacgggtgaaattgtcgaaggcattgttggaacctccttggctgctataaattgggtttagtctcgctctgtagattggtttacatgcgacttacctgctcaagtcttgctttgtgccgctaatgaattatacaatctgatttatcgattcaagatgtgaagttggttaggctttgtttttcttactagggcaaccataataaaaggccttgacgggacgtctaggaaacgaagatctagatcatgcaagggctagaatggattttttttctgaaaattgaacccgatatgcaaggtattcacgggatgatgatcgatatatacaacgctttatatatgtctgagataatcaagaaagttgattatcgagtcattgctattgtgttggttatcactccccatatagtttgcttcatatcaaaaggtcatttcgatatgataaattaagacaaagaaaggcatatatatatctgcattgttaaagggattgtcctactggatcgagggattccatagaatattataagtatctcagtgctcctctagcgtcatagatgcttaatcaaaattcagaactatctatcttggttataaaagcccaaagttttactaggtctaaaataaataaagattgatataatccgagatatcgttcactcaaaccgttctataaaagcactgaaccccgcgatggcggggcaaacgcgcccaaggtcatagatatcagctcccccatttaggaattctcttttacatgaccttgtattgaaaatagatagaataaatgtcaataatctacttctcatttgagttagtacacgtggcgggtgaagctcaaactcaccggagtggaaatccttttcacttttcccacaatcccgcaatccactttcaacaacctttgggacaccctcgaacataggccaaaatgcccgataaagactccagcacaccccgtgtcttcctctaccgacacggtatgttccagaacgtcaatatctgctttccgtagtctgactatagtccagggcagacggaatggtccaagaacggacggtacaccggaatcacggagcttgagctcactcaagatggtgtcaaccaagtcaatgcatctggcaagatgatcgtcggatccggcaaattgattgacccagccaaacttgcgcatgtctacatcagtcctcgcaggcgagcgattcagacatttgagattgctttctctgatgccgataagcaggcgcttaatgatgcgcataaggtctctgagacagccagactcgccgagtgggactacggtttgtatgaaggtctgttgaccaaggaaatccgagccttgagaaaggagcacggtctggataccgagagcgagtgggatatctggagagacggttgcgaaaatggagagtaagtctttttcaaagagaaactctttcgaattatatccagtctacgatcattatatctgacaagtcaatacaggtctgcacaacaggtgacagaccgtcttgataatctcattcaagaaattcgcgcgatccagaaggacaatatgcacggagaaaatccttctgatatcctgctggttgcacacggacatttgctccgtgcctttaccaagcgctggttgggatatcctatggagttccctctttctctgatgcttgaccctggcgctgttggcgtcctcaggtaattcctttttctcccacttcgctggcctggcagttgacctttatttctacttgtagttatcagcaccatagcattgatgagcctgctatgttggtcggatacggatttccgttgcaggaatgatctgatatgtctggataatagatctcatagaagatagcccggttgttactaaatatagacttgatacatggtgatgaagagtcaatggggattctggcctgagtactcgaaagaactgtaggctctcctccaggggccgtagattattcatagtctaattccagtccgtccaattgatcctcgaagactgtagtaaatgggatgaatattgtatgagatcaggcaaaatagacgaaaatggattatttgcccacatgactagaaaagagaactttataacttcagagtttctaaaaccttctactgaaatcgcatcgaggctatacttcagatcaccagaccagttcatcaagtcatgaagttcaccgagttcatcagaagttcggcaatgcccgttcgcctgacctggccaactgacaacagatatgaccctgcccctgtcaccccctaaatgttgtgtcttcacttcaaatatgacatcaatacgagtgtcttcaaaggcagacaagatcaggtgggaatagaggctcttggctgaagagcaccccggatggcactaacgggggggctatatgatcgcctcacccctgatgggtttcttttatttctttgcaactttacgccctgacatatgcttttcaaggactttcctctggattgattctactaccgttctatcatagaagccttcaatcttgaaagtggcaaggtcgccaatatcatgccgcacaaatcagacgagttgtcggtcgctgaggctgaaaaggaggtccatgaggcatcaactcccacgtctccaacaccagcacaagaaaaacgcggttcgaccttgataagtttcttctcgtcttttcttggtcccaagaacccgcttgcacaaccagcagagccacacaagcagaccgtatggctgctagacaatacagcgtaccagccggtaaatgaggatgcaaacgagaatcatctgtgctggcacgccgaagtagtcgcctatatcttcgaaacagaagggcggaaagacgcgggcaacctcgtcgccgcgatcgccgaccacatcgggctggacggcgaggtgggcaatcacgacgaagcacgccaacgcatcgcagagcgcgtccagcccttccttgaccaggtgtcgccagcgcgcacagtcatgctgcaggtacccacatcgccacgggcgcaatcgcacggactcggcccgtccgaccgtaacggcatcgtcagccaaacggttgatatgggcgaagtgggcatgtatgacggggaagttgtgcggccgcggctgcaggatttcggcgacgaggctgtgtcgatgagcacgacctttgccgcccctgagggctggctggtcgtctcggatattgacgatactatcaagcgcactatgacgcctgagccgacgggagtgattcgcacaacctttgcggatatccctgagcccatcgctgggatgccggagttttataaatatgttcatgctgagctatttcctgcgtggttttatctctccgcgtcgccgcataatctttaccccttcctgcatgacttcctggatgaacactactccccgggcacgttggtgttgcgcgattactcgtggatggatatcacggggcttatcaagtcgcttactgagcagacgcaagagtacaagcttgatcggctggagaagattcgggggtggttcccgcgtcgaagggtgctttgtataggggactcgacgcagaaggatccagaggcttatgcggagatgtatagtcggtatcccgagtggattcatgctatcattattcgcaaggttaaggatgtggcgggtatggaagagaagaatgaaccggggaggtttgagaaggcatttgagtatgtgccgtcgcatatttggacagtctttgaggatccaaaggagttatataattttgttgatgggctgggtatggaagaccaggccttatagatgtaataacctgtgtatatttagttggaatggctattttgaacttttcaaacatcactctcgtgacacgcaagggaataacggtctttgctgtttgtgccatgacaaagacaatggcaacctttactgcaactatcaaatagatagactatgatttccaccgtaccttgggggataatgcaagcagcgatctatagacccattgattgtgatcttctatcgcactatccaacttccacgaatcccagactctatatataatattttcatgccaaaccaaatcaaatagagatataagatcgaattgctgttcattgcaatggaattgttcgggattgtcaagtggcaatgttgacttaagccctacatacgtcacgattaggaaatgacctctgatctatagacgaaatggcgaagaccatacttccaaatcgataacttccttacgagaaatcattgtaaagtctcaaagatctctaaactaagaagatgtatcaagatccaaatgatactatgcagtcagacatacctcccacgcagcccatcgtggaacactccccaaagcatctatcagagtcctcaacacgctccccaaaagacattaagccgccatctgagccctcaaaacgcgcatcaggagcgacaagaggcacatcagaagccataaagcccccttcacatgctggaaagctcagctcatcaacgctgaacgactcaccattcataccactgtcgatgcgagccctctacttcaccccagacggatcagacaacgacacacccgatggagtcccagaaggagaaatcagcgacgccatctcacccgacacaagcacaagcgtcgtgcgccagaaaggaacaaacatcgtcttcgacgctgggttcccgaccccgcagccctcccctcagcaatacctgctgaagatcgccacagcagccttctgtcacgacgagatccgtctcgccagactcctcaatcccccaaagaccacgccgcatatcccactgcacagtctctgcgggacagtcgtcagcactccgcgcgacgacgaggggcgggaagaaggcccgaagttcaaaattggtgacgtggtcttcggcgtggtgagctatacccgtgatggcggagctgcagactatgcagtcgcgactgagaccgagctagcgctgaaaccggataatatcacttttgctgaggcggcggcacttgcgctgccggcgttgacggcttggcaagcactttttcggtatgccgggcttgatcctgacttgcctggcgggttgggcgagggcgatgatgagtttgcgaatgggacggggcggtggctttggcagcgtcaacgccgtgagtccgtgctcggtagcagggattatggctacgggcgccgcaaaagcagtaatagcggcctgttaaatcatactataagtggtaatggtaacgaaagtgggaacgggcattgggtttggcagtggaatcgcggcggctccagaacaagtgccagtggcagcgtcagcggcaacggcaacggttccgacattgacaacatccctccagctgctagagcggtcaatcccgcccccagtcctacgaatgtgcgtcgcgagagcctaatcagtctcgtcagcggtaatcccagtggcaagaaaaccgttgctcgcgctgccagcacagttgaccccaatcccaagagtactgtccgccgcaacagtttgatcagcctgatcacgggcaacaccgacgctccatcctctcgcgctgcgagcacagtcgatcccacagctaatcccgatgccaatagcaaaccccgccgcggcagctctagcccgagacggcgcagcagcctgttaggaagcataattggcgctaattccaacggcagcgggaagccaaaaccgcctattatccgagtactcatcaccaacgcccgtgacagtgacatcggccgtatcgcagtgcagatcctgcgagcagattcgctcttccccatagcgttccggccgtgggtctgtgtaacctgcacgcaagtcgaagccgatatcatcgagaaggactgggaggtggacgagatagtcatcatcccgcacctcccgtcgcctgaagagtgtaatatcgagaaggtgttccgcacgcgccgctgggagccggttgatattgtactcgactgtgctggtggagaagtattccgagctgcccatgctgccggtgtcgttaaggaccatggggctgtgttgactgtcgtggatggccaggttgcgctgcagtctccgcttgttcctgagaaagatgtgctgggcgagaggaagcgtgggattaaaagccggtttgtgcctgtcaatcctgatgggccggctctggagcggattgcggagctggtggagcagagtctggtccgtgggagggaggttactattgttgatctttcgcatgcggtggatcttttggcttctggggctgctgggacggcggggagtcggcgcggtgggatggtggttgttagggttaatagtgttgcgttcacgtagattgtcatgtttatgcattttaatacagagatatcaaaagtaagcacgtcacagggagcaatgatgtcgaaagcaacctatggttgtctatcaatttgaaaagtgttgggccacttactcggttgggccaaatatcactttcgcaatgcccatgtcccaaaagccaagtccaagaaaagaagaagggaaaacaaggggtgatgtaaatcaaagttaatgagatattccatacaagaataagttttgacccgatgactgcatatgaaagaaaagaaagcgatgctctgccccatcccacaagatcaaactacatgaacagaagaagaaactgaagttttgtggccgaggtggaaggcaagtgagagagagaaggcgcaaaaaagaagtcgtgaagaacaaaagacaagtgtattagtacctccgttagagtaaagagtcaagtctggtaaaaacgctcaagcatgcggcgacaatctgtctacttgttagcacattcaagggttgaacgcggtatgaggtgcagcttacctccatctgaagctctttatccttgttccgattgatctcctcgttgaccacttgagctaaattggctccaatcgcctgggaacctccggccttcctgccaaacggccattgcgaatactctgctagcaattcatccacctgcgcgaaagctctctcgcgagcctcgtggctcatggtgaccaaagcgttctcgaggacgtttgcggcgtatgcggcgcagaccatggtgattgagcgaaggtatcggtattctgcgtcttcgggaagccatgggctaggagggataatcacagtgcggttactgcaaatgttgcgcacccgtcggtggagctcgtctttcgcgccgccgtcggccacaggatgcgtcgccatatcgaagagaaggaagttgcgcttttcggttcggagaatacccttgtccacaagacccttggctagtcgttcccggacttgcttcaattgatatccaatcttcatcaggttccaggtttcgcctaacaagtagccccggtcagcaacgtcgcaacccaaatttctgctatgggctgatctcaccactcagcaaatcaatccatgagttgacgctcatcttctcgcttgacttcatcatcttcagcgtctcgtccagcaagacctccccagtcaatgtatcgtcgatgacctcgatgatgcggtcggccagggggaaacgtcgccgcgacgaatccttctgcatgcttatacggccgcggagcgcgagctcaatgacgatacaccctcgcagggcatacgagatgttttcgttccagaaagacagataaccctgttgcggcgtgggcgcgaggtcagcgatcggaccacgaatcgaacaaagcaaagttggggcatgagataatatccatgaagactcacctgtttatctttcagacccagcagcaagatatcctccatcagagtcaatttgggctgcttgccccgttcctcgttttcgctgatgtcgcgggggtcgaatgcgatcttgtggccattctctgcattggtaaaagacgtttccggtccacggttatccgtcgcagagccatttcgggagattggcgatgacactcggttgtcatcttgttcgtctgccccagcgactcgaccggcgcctctgcggcgagtcaagcccccggctgctgaggccatgagatcgggtcgggttgggcgggggatcaaaaagggatggagagagatatggccggagatgaccaaaggcttccgatctgtatgccggtggttcgaatggtctgggttggtgagatgttgagagggaccgtttaggccgaaagtctgcggttgaagtgggactttcggtgtcaggggaaaccagagaccgagtgggcttagccaaaacgatacagtgtcgagtatactgaactaaacccgcctaaatacgagaggaataggcgactgtaaagaatggagttgtgaaaagggtgaagttcaaagtaagttagttcggtgatgtggctctttgagtatcggcgggtgcttaaacacccaagggctagcaatctccgcgttatgagtttatttgatggctctattttttgaaaaattgggaatatagttaagttagtatatatgtacaatctattcttatatttcgatatgcttatgtactctgtgtttttgtcttgtgttcactgttaaaccaaaatatgtagataaatcaacttaggactacatccatacattccatggcaatcatatgagatgtagaggtaactatatacctaaacatatactgaaatgtctagacgcatatggtgaataccactacgtagcagttctgcttcaaaattgcataaattgcataaattgcactcaaatgatatacacgatataggaaagaaaagccactggcatgtattcagcatacaaaatagcatgtcggttgagtgtcactgtgtccagcaaaccccactgatgccaacatcccgattctttttctatccgactctccaaccgatcccaggtattcaaattaaatatttagtgggctgtgaaaaagtcagcacatgtaaaggaggaaggggtgctatgggattcacataccatcgggctgggccaggatgtactcgacagccttgtcaactatacataatattcatgtcagctctggtaaacgaaaaataacaaggtcatcaagccctaacataccgctgtggatctggtcggcctccttgtcggggatctcaatgctgaactcctgttgagacggttagatacccatcatataatatacaattgatgcttttccgaggaaaaccgggcgcgtacctcctcaatggccatcacgacctcgacagtgtccaggctgtccagaccaaggtcgttcgagaagtgggaagtgccattaatctgcaggtcaaataggtttagtcaatgaatgttttcggtcgcctcccatagctcatagcgatgtaaaggtggcgacggtgcatccgacagataatcactgaccttgctggcatcggagacctaagcatgaaacaaatgcagttagtaatttgtttttcgtctatagccgatagatggcgagatttccggggaaacaacatgacgcaccttgtcgaagttcttgagcaaattgactatccggccctcggcctcgctcttgctaagaccggcaggggcggagtagagacggataccctgagcgaagcgaggagtgaattgagggacctgggcagcaatgggggagctgcggatgtggaagggagccggggtcctgatgacacggggggcggaagccttcaaggaacgaacaatggcggagcggaacatgatgaagtagattgatcggactagcgcaaaggctgaaaagatctaaagtattaaaaagagatggtggagagtaaacgggtagagattggggaaagacggctgccgcagaagaggaaagatgtgaggtcgcgcccagcaaaatcctgcgggccaatcaacgcccgacagaaaggaatgacctaagccggaaacctgcaaaccaccacaacctcagacttgctccccttcacctccaattgaacctcgattgccccatatctccaacctcactctcctctccaaaaccatggccgccacccgctcggtcgcgaggctaatcgcctaccgtcggccgacccccttcggattgctgggctcaaccgcaaacttctcttcttcgacgtaccgcgcagcaaccccagcgggaccccctcaggccgggttccgcctgcccccgcccaagcactgggatcagagctccgagtccgccttggacaaggccagcaaatatttcctcatggcagagatcttccgcggcatgtacgtggtgcttgagcagtttttcagaccaccgtaagtccttgtcccactcaaccttgccggcgatacggatcgcaatccaaaatcaatggcatcgaaatatatcaactaattgcgttgcaatgttccagttacaccatcttctaccctttcgagaagggtcctatctccccccgtttccgtggcgaacacgccctccgtcgctatcccactggtgaagagcgctgcattgcttgcaagctctgtgaggctatctgcccggcccaagctattacgattgaggccgaagagcgtgaggatggaagccgccgcacgacccgttacgatattgatatgaccaagtgcatttactgtggctactgccaggagagctgccctgtggatgccatcgttgagagtgagttcaacaccctcaggttacatctcaattgacattcaagccggattactaacatttttttcttacagcttccaacgccgagtatgccaccgagacccgcgaggagcttctgtacaacaaggagaagctcctctccaatggtgataagtgggagcctgagattgcagctagtgctcgtgcagatgctccctaccgataatctatttccctccaatctgattgggatcttcaggcaaatccacatctattccagatgttagatgtgtgaacacgaagatgctagtcgcaatacccatccattcaagaggcactaagcctcgaaaaacaagaatgattttaagcccatcacattactgtacataacttgccctcgattgtgttatcatcttgtactagtcaattcctaaaggaaatgccttttcctggaaccctggcccccttgtctcttttattttctatgttatggaatctagcaactctttttcttctagttgagattcatatataaatttggcaatcccatcttatatcttcgctgaacactttttcgctaaccgcataaatatagtacatcttgagatctataggtttacataggcataaagacaaaaggaagacatatacagctcgataagaaaatgatattgtattcacagataaatcaaatcgctaccgatgctgtcatgcatagacataaagtgacagactaagctgccaaagacacaaacgtaaacaccaggcaccttgatctccggatggatatttcccagttcaaagtctcaaaacactttttttagttcgggggcttctgtgtgcgatcttgttttagggatgtaaacatccaagacacaaagactgatctgaggggtatgcagagaaaataaaaagaagaacgtaaaacatgggttgatgtaaaagcaagtgagaaacgagataaaagtaagccactagatagaagcttgtttatttcttcttgccaccacccttgaagctgccctcaaatccaggacgagcagccttcttctttccactgctgctagacttcttcttgccccccttggtgcccttgtcgtcccggcgcttgcgaaggttctcctcgcgcttgttctggcgctgttccttagatttagcgacagtgtcaatgcggtccctccactcgcgctcagacttcttctttgccgtttccttgcgcttgagggccttcttcagcaaagaggtatcgtcgcggacacgctcgccgtgagcacgcttcttcgcgttcaaccaaaggtccttctcttcaacatcggcacgcttggtagggtccatctcttcgagacgggctttcttggcctcggcaaccttgagctgggaagccggatcacgggcaccgccagtcttcggcttttcgcgtacgttgtttccggtgatatctgtctgctggccgtctgtgaacatcacacggccgaaggagaagttgttgctagcggagctgacggactcggcaggggagcggggggatgccaggagcgatccagagccaccgggcgagaagcggcgggccatggcctcgtcattcttcttttcttcctcaaccttggccttttcgcggagttctttcttgtgtgcctttctttgttcggccttttgccggcgggcttcgatcagctcttggcggttgcgtgcaggcttgccgttgagtccatctgcgtggcgcttggcccggagctcatccagacgcttctgtagacgctgcttcaactcttcgggtgtgtgcttaagaggcttgggctctgaggatttgacgtcggtagagacggagggaggaacgatggaggaaatggaggaggtgccggattgggggtttgaggtatcgaaggtaggagagtcggtggtagaaggggcagaagaagggtcttcctgttcagcgttgaactcaatagagaacccttcctcgacaacaccgtcatcttcttggtcgtcatcttcatcctcggacgcttcagtgtccttggctgcattgccgttaggcttggttgcagatttttccgaatcctcggttggggtagtcgatggcttctttccctgctgggctttttccttccgggccgcatccttggccttctttttctccatttgtgcggcctttttctgggccttcttctcttccttttgctttttccgtgcctcggcctctgctgccttggcggcgtctggcttatcagtcttttcaacctgcttttgcttcttgatgttggcggctccgcggttcagtccttccttaggggtctccgtgcccatctctccgtcggacgagtcggactcgagggtgccatcctcccgctttcgcttgcgtgcgttttcatccatcacgtctttggcggtcttggcggcatcggggttcagcttcgcccgcttcgcctcgcgtgcttgttctttggtttgctttttgcgttgccattgatcctaaaaatgaggatgatggtcagacagagatcttcagaattaaagataaagccaagaacacaagctgactccagtcccaaagccgctaacgtatgaaatgcaacagggtcacatacacttgtatcttcttcgccataataatatttggcggggatcaaagacagcagaccgtcaaatgcctgcgcatggctgcgcagccgttccttgagggcagtcagctcgcattccttgcggggcattctccgagtgcacaaacctcgatatcatccataatattttccagtacacagaaattgtattctggaagggaaagctagacagtcaagcgcaacgaaaaattttggggaaggaaatcttggcgctacaattgtctccgcttcggctggttcaccgccctcacacaacaattttgctgtattggtccgtgcattttgatagacaggctccaggtcggttgattgttcccttcaccgtattctttctattcatcctttttgattgtgctcttttctaccttgatcttcgattgattccatggttatgcattgttttattcaatacatgaataggcactccatgataaatgacgtggatattctctccacttctatatcagacctgatccacgaggccagtcctaacgtctagtccagggcatccctcgcttttgatacttgtcacattcccatacggccaaggatctgtccaaatcacgtcgaatctgaaacagttagcgcaggacataacacaaggcaaacaaacgctcttctgtcgagtcgcgagtcgagggttccatgggacactcgtctcccagacgtatgtcaagcaatgcgaatctcatactaacaagaagacacatgacgataaaaattacctaccgcttatttggatattcaacaggctcccaggcaccaagctcctccacaatcccactcatagtcgagtgccgccatgcaaccaaaatgtttcccggtccgtcatacgatctgatcgccttagccacacatttcactttgttccgcttgcaatgtgtgtcaactctgagacccagatctctagcaaggggtagaacggtttcaaacgcacggccatgtgtgccatctacaggcagaaagcatattgtcagccatgtctatgacacttagtcacctgcgtgcctcgttgcagcactgtggtttcgatttgctctcgattattgttgtaaacctaccccatttcacacgaggtgccataatatgcccgatgttgtactccgagccttggccgaaaacatgtcttaaacactgtgcccgcttgactccgtctagtgtcaaaccatggtcgttgggatcctgaggcttctcgccgtgtcgaattatatagaccgttggatgtgattttgcggacacgataccgaggcaaaatcccagagctgagaagaccgattgcagtcgcatttttggcacatacactaatcaacccagtcgtatacaaagtaagcgggtaatagctaatgtatggacagtcgagcagtggaagaccacagaaaatgatctttggggacaattataagagtgtgggaaaaagcaaaacctcatggaaatttgcttatgtcgatcgggtgcccttagctctagttataagtacaggacaccattttgttatggagtcacataccgaagagcacaatagggctgacacaaaaaaaagcaaaggtggatcagcagatgacattccaatgatatgatcatccaacagcaagggcgactacagaaagcataaggttctgcaagttgacaaactacaggcaggcgttcggtcgatgtgctatgatgcagtggtttgattggtctgcagattatgcatgttcattgtactgcatcgatcgactcggggttgggaatggtctcggagatctgtacacagtacatatgcagcggtgtttatagtcaagagcacatgtacaactgcgatttagtttataaacgtatggaacagatctaatgacaatgaacctgtggtcggagtatatctcggatgtgattgaagactctcacaattcgatagtggtcagcgtgcatgctgtacaacgtaggatatgtatgaggaccctaggggtagatcaacctactgtcacccgatcggacaagtcccatatgatagtcccatgtttaaactagtcatgcatcaatcataatcgatcaactagcccactagaaacgagagcatctaagtggtccacggcatggagatatgggaatcgggggaggggcaacacacaagccaggcttggtgatttatgaaagaaaatggtctggtgactggctcctttgccaatattcattgaaggcagtaggtgtctactaatttagtaattcctcggtcgtatgccctagatatatattgttgacaccaagtgattgacgttgtacattgttgcctcccgattcgccatcatgtgatggtcacccgagcatgtcatcattatgacttcaaagcaatttgacttcgatgttgttttgacaacatgttgtcagtcgtaatagttggtatatagacttggcttcaggcgctattatctcttaggatcagaaatccacgactcgtgatgtgttcggcaaatgacgccacctttaaactgttctgttcagcttactccgtagcgtaggcagccacataaaaccgtcccaatacggccgatacagaggagacctcgggagccaatgtgcggcagcggagaaagcgattctggaagatccgtggaagccgatagatccgcgtaatctattttgggcctaatctggtaatgtataaaccgaggctgagcccggcatagccacagtaggttacagtattgtgttccaaagttggaaatgtggctgtgtaagtgacttaatcagaggctgagtgcatcatccatggatagatttcaagtccgaactagtaaaagacggtaaatgcacagatgcgcaagatgcccaggcgtacagggctgaaaatgcccgacgcttaccaacgctgcgcctcccctcgttccgtaacgtttcgcttgccatgtggggttcttaccgtcagccctgtggttacttgaagtcacctcttataaaaggttgcccccctcacttgacttctcttcatcacttaccactcctcacatctacactaccccaccttccatcagccatcaattttttatcaagccaattcaaattacatcatgtccggttacgatcagtacaaccagggtggctacggccagcagcaaggctatggtggccaacaaggctacggtggccagcagggctatggccaacagcaacagtacggtcagggtcaagagggctacggccagcaaggctatggccagcagcagggttcttccgactactactccggccagcagcaacagggctacggccagcagcagggtggttcttccgactactactccggccagcagcagcaaggctatggccagcaggaccagaaccgccaggggtatgtccttccctctccattcacttcattcattatgtactaacagatcatagtggctatgagcagcagcagggtgctcccggtgaggcccaggagggcgagcgtggtcttgccggcgctctcgccggtggtgctgccggtggcttcgctggccacaaggtcaaccacggtttcctcggaacaattggtggagccatcattggtagcatcgctgaagacgctgtcaagaagcaccgcaacagcgacaaccaatctcctcctcagtacggtgccccccctccaaacggtcaatatggcggcggccctccttcccacaatggtagcggcggcggctccatgatggatcagctcggtggcttctttaagaagtagaaggtttccgatgaacctctctcttgcgttttctgcctgacgacacggttttcatgaatttctttctttgctcttattatcccaatgggtcggcatgcatttttcttttcgccttccgccagatcgctttcatttctcatgggtttttttctcctccttaaagaggcttgtaccatgacagagctgcgttgatattggaaatcgcctttgtgtggtctgaccataattttcagaattgcaacgtgattaacttgcaacattccttgtaaaagacagtaaactaattaagtaaattgccattgcaaatcaaaatgatagacacttccatctgtgtgtatgttgtagcaggcggaggccaaaacacaaccccaagtggaatagcgtaaggcctcaggcatcaaccgccaagcccgacaaaagttcgagcggacgagtccccagtaacctcctcgtcagacatatctgcaatttagcattcccaaaatgattatacggaagctttgtatgcgccagggttagtttggtccaattgccgctatcatatttaatgtctctgctaacgacatcccacaggccgccagctccttgctctgagccgtcgagccccgatctccagtcgtttccaatcgacattgcccgaaaccccagtcgagacattgcagacatctatcagagatgagatatctcgcccagaaaaccccctctttgagatggtgcaggcgcaatctgaggccagcacacccgcacaacaagagttcacatcagacgagcctcaaagtgagccgcgaatatcttcccggagattcctccaacgcatcaactaaccttgtctttcttttcttcccccaggaagcaatttcaaaaagctcggcacaagtgtgaaatcctcctacgaccccgaaaatattatccgcaaccctcccaagccatcccagatctccctggaaatgctgctcgcagcaggaacacacctgggccactcgacctcgcgctggaacccacagaattcgcgatacatcttcggtatccgcgagggagtgcatattatctcgttggacgtaacagccgcgcacctccgccgcgccgcaaaagtcgttgaggaagtcgctgcacgtggcggactaatcctcttcgccggcacgcgaaagggtcagaagcgggccgttgtcaaggcggcgtcgctggcaaagggctaccacattttcgaacggtggattccgggctctctgacgaacggcgagcagattctcggccactgtgagacgaaggttgtcaacgcgctggacgaggaattgcctagattcaagtctgatcttgctgatcgcccgtcgctcaagcccgatttggtgatttgtcttaacccgcttgagaatgttgtcttgctgcatgagtgtggcctaaacaatgttcctactatcggtgttattgataccgatgcggatcctacgcgagttacttacccgattccctcgaacgatgatagtctgcgggctacttgtcttattgcgggcattcttggtcgtgctggtgaggcgggtcagttgcgtcggttgaagatggcacgggagggtcggacttcttacaatcctatcacagccgaggagctgcgtcttgatccgtttacgggtcaggctcctggtggtgagggtcagaagaagtaggggggtgcgagttgtgtattccttctgattgcattttcctttcatttttagtatccggtcgattgcattgaaacgacgggactctgtattgtatagatgattccaggtcttggtgttgagatatgtattaacaactttgagtcaattttggttctttttttacttgaatctagcctgtaacgaggggacgatacatcagtaacagcttctggaggggcttaagcctgtgatcttcggtatagatagttgggccaaagatgtgatctctcctttaatcccctcaaaaaatagcaggataaaaggcatcactttgccgacctgttcaacgccaactatacacttacatcaacgcagacgagatctatcgccttggaagaaaacggaaagcaacaaggttcacggtcttggtaccatccacctcggaaaactcgcggaatcgctcaaatccacatttcaacagtaccctctggcttccactattgcttgcttccgtgatagcgatgaggcactcatccactacaccttctccaacgaccattcctttctgaactccgacctcccgctccgtccgaggcaattctgaccaaaaccgcagccaggaactcaagaactctgtcgcgatgcctttcccccaagcgtccgtccgaagcatgtatccaacttcaggccacccatgcgttccaggatacagatgacagccaccgataccgataagctcgcccgttttcttcaggcagatggcgcaattggcggtgataagatcgtttggtggtaggaatgcatccagtttggattttgtctcctcgagactttcgtcgatacaccccgccttggtccatcgcatgacttcttcctgtgtgcgcaagacgtgtaactcttccaagtcggttggttggaggggacggacgagtaagcgatccgttgttattgctgcgcgctcgctatttgcggggagcgggactgtgggcaagaatgccttcacaattacagattctccctctgtggccatgttgatacctactttcagtgctgctttccagaaatacctgtgtgtgcggcgcggttgagtcactaaaccctggaatctattctaaccttgaaagtgcactagtgggacaaacccaccttggcctaactccgaactataattggcgtgttgctttggtacataaaatgccgatatttctaggcaatgtggcctattgatcagaaagaaaggctagtatgcaatttatcaagagagatggaggacggacaagagatggtagacagagcgagatttatttgccctaactgttaaatgtgggtgccccaggaaatggtacaaacccagtaccatcaatatttgaccgaacgacgagctgataaaggttgtgaattcttactggagaatcccaatttcatcaactggtaccgagcttctgattcacagcagttgatgatcttcggcgatatgggcagtggaaaaagctttgctatggcatttcttgcggacgagctggtacgaagaagcaaacaccaattacctcagcccaaggtctgctattactattgccgggatgatgagactgggaaaaccgtcttcatattatcggctataattacatcgcttcctgggcagctcacgggtctgaagaagccatttgttcagtggtataaggaggctcagacttctggggactttgatccggcgacaaatttcaaaacactgggagagttcttatgcagagtgcttgaagcaattgatcgcccggtctttatggtgattgatggcctggacgagtgcaatagagaatcccgaagtaatctcctgacaatattgcgaaaattgtcacagggggttttgctgaaaatcatactgtcttcccgtgcaaaggagagatcttggaacagcttcacgatacggctaagatcgaaatggtagctgacgctcatagagatggcattatcgtcgcaaaagtcgtcgaaagaaagttgttcgatctatcgccgaatgtcaagtcacttgtcatcgacagacttacttgtctagcaaaaggaagcgctatatggacaaggatgactattaagctgatctaaactcgcaaaatcatggcatttgatccgatgaaaagtttcttggaagaaatgtcactccccgaacagctattagaggtttacagcacgttgctctcctgctgctcttcaaacgatctcgaaaacctcaaaattgccagcaccgcgctcaagattctcgccatcattaaccgaaatttgagcatactagagctctcctgggtcgttgcattaggtacgactcaacatgtcactaccgtagatgctcttgccaagctggtggatcaccagagagtaatgaggttaattcaccagttcattgcccatgtcgagttcagagacgtaaggaagcaccaggttcgactcgtgcaccagtcggtgaaggagtttgtactgaagaatttcgtctcgaatcagccatggcgacacggcccaatctcaagagaacccgatgatatgattcttgaccagcgctatgaaagtctgcaggcatttattcttgatatttgcgccaggtatcttcttcttgaagacattggcagaagaactctgttctccgaggagcttgtggcaattgcggagctaccccaaggatccgatatattcaatgataacgaagggtcgattgagtatgacggacattgcacatgggatgcctgggaggaggatatgatcaattttgatcccactgatcgcggctttagagagttctttgtctacgcatcatgccattggttgaatcacttctgcaccattacagctgaacatattccaagtctagaaaccatagagaagatatgccaagcgggctccactcgattgagcaattggatccaacaaaactgccgcccaggctgcacgttaacgccaagatttgagtttgaaagcagtctgtacgatcctctcagtatcacttcgctttatggctcagtggcaatgctacgagatatgcttgaaaactcatccttcgacaagaacggttttctcgaacagtcagctatgagagctgctcatgagattttccgatgagggaacgtatcaagcttggaatcatcttcttcggtgatcgacttggtcatcacctacgacatcttgactttttccgacttatcatcaaatggtggtgcaaccgcactctcaccgaccactaatgcgatcttgtatttgatcttgtcaatggtgtgtcaaatcaaatggtccaggaacaatggggaaatgaacttctgtgcatagctgctagtgcaggctgcatgcaatcgagacagaatgcacggttgcactgttaaatagcccttctcatcggaatgagaggttaacagcacgtggataattggaggttataaccttggaatctagtcgggattttgttagatttctcacaggatatgtcatcttatttacttgccgtgatgaaccctatagtaagtggatggatgcaaatgccaacgtctgacttggcgggtaaaattctcctggaagtccaccggggcacattggggtaattgacttttgttcgaacgggcttccttaggcctgtgttttaaagttcaatgcggctctacaatttccatgggtatacaagttccaaccttggaaaagcttttaagcttatttttccaactcaacctttatgacttccagctgttctttgtttattggatttctttctctttgcattgttctctttggcttcgtagtctttgcgtagccttcattgcattgagagttttctttgaactccaagccgtctcaactctcaactatataaaacccaacactggccaccgttaaattccgtgagaaggacatactatacctagatgtaatagttacctagcgtctttatagactcttctattatctcatttcatccagccctttaaccattttcacaaagcagaatggacgacaattaccctctgtgggaaaagaagggaagaagcctacagaaatggatcgagaactaccgtgcagcgggttgcccgtactccatttccactttcaatctgaagcccagacatccggactataccgtcgatcgcacatctgtgcatctagacgcaaaattattgaccgcgcttaacatgagcaacgcgaattccacctgtcgaaaaattagcattaggcagcgtgacgaaggtccgccagtgtggtggattgggcgcactggaccaggtgtgatcttgattgacgatatctttaagtccaagagaagcgacgatccatatatatccgagttcaccaaggcagcctacaaactggacttccccttggacagtctgaagaatgtaattgttcccaatgtaaacgaagtgaacaccatttcgtgtatcaaaaaggtgtacaaatcccgcgaaggacttcgttatccatccagcacacagcaggcttgggagccgtcctcgtccgagttccatgctctgctaggaactggaatcggcaaaatcattgcagcgttcgttctgtgtgcatggggccaagggagaaagcgaattgtgagaattgttactttccacattggtgccgacgttcacaagctgtatatgcggttcgatctggatgatatgtgagaatttcttccttgctttcgttggccatctgatcgttttgaatgtttaccttgaggtgagtaggtagaataaattgtctgtgagagtttctttaatcgcatttatatctaggaattggcaattggcgatttcgacctaatacatctctgacaaggcgtgatttttacagcagcgcttcagagcgactaatatagaaaaaggtgcagatatctgagtcggatatcatgatatcatgatcataaggcagctggaatttcagacgaaaacaaaacaatagtatgtaaacacacggagaccgcggcctcaaatgccggaaatgaccatatttctagcacatacaacgaaaatcccaatatggcacccatcgctgcgattgcaaaattgttctggtttcaatccactcaaggaaatatcccaatccgtatctcattaaggcatatgatcttcataaaatcatcaaaaacacccggcgtaaaagaaaaaggaaagccgatcgtataaaatcaaatcaaacgacataaggcgcaggtctgctgcgactggagctgcgatgacgcgagtgtgagccagagccatgaccacgacgactagaatgactgcgtctccgaacaatcgtctccttaacaaccgggcgatgcgaatggtacaagaacagcgcaagcagcgcagtccagaagaagaatatcgtctccatgataccaagtgcgaagcaagccttcagcatagcgcaggtcttgttgacgtccagcgacagcggattatttgtgctctggccataggagccgaatggacccagagagatccagacggagccgccatgccagctggcacagttggcgttggtgataaaacggagctcgtagacggctgcaataaaggcgccgacgaagagcaggtccatgaacgcgacgaagattgcggatcgctttgttgttgagaagcggattagcgtgtcgatggcccagaagacggcgattacgctgacgatgaagaggaccaggatatatggtggggtcagcaggtttgctttcagatagccgttcacgaagtaggcctatattcagagacatcattagcgggagactcggaggggtattgctgatcggactggttaacagtggacataccagcatgccaatgattggaatcaggaagacgatctcaaccaggcgattgaatatgaagaacacgctgccaatcatcttgacggttcaaagagagattgggtttcagatctttggaatgtgcaactgtcccgacgtgcttggggtatgtccgaggcgccgtaacaagatcgtggggctacacgagcttgcgaaaaaaagcacaggcagttgcgattacagtgcaggatgcacgttttagaagacgcagaaggataacagaagagaaagtaaaaaggaaaaggaaaatagacagaataaagaggaaatcaaaaaaaaagatattcagcgtcatcttgggccgaggaggctgggcgactcacaacgcacgatgtcggtggctggggtatcccgagtcctccatgatgggtctcggcatctttgatatattgattagtctaagaacctgcatgagcagtcacttttgatccacgccttgcatttgattactccgtatccctcgggatgataggttagggcatgagaatatagatgatcgttgtcaagccaaccacataagtggagactttacggggaactactggactggacttcattgcacttggaaattgcatagaatactatttctgtttgaagagatagaggactcttgttaaattcatgcttggtcgaggcaacaaattcaggttctttgtttccagtgccaacacgctcataatcatattagtacagagttgtatcaccggccaccgcaataatccatggcttcatcaaatcataagcaaataacttgggcaattaccgctctgaactagactgcaaatcatcaatgaccccgtcattcatgtttacatggggatgttcgtcaacggacgccccggacccgccatcgcgtcagggacatggattcccgcattggccgtcagcggctgtgtctgcgacacatatgcattactggggtcatattgatgcgcattgtggtcggggccgggattctgccccatcgtatgaccatgtcgcatttcatacccgctgctaaggtcgtcctcactcgacgaccaagcaccgccgtcaagatcaaggtcgtgtggtcggcgattgtaaacattcgatggatacgggttggaggcatgaatataggtagaggtgtcgggtcgggcatgttccgatctggggatatctggcgggtccatgcgctcttcttcggggttgcggagagcagtcgagctatcttgcctgaagcccttgagtcgaactgtctccggtcctgaaggttcggtcccccaggttcggattgggtaggcgcggcccttgcgccagggttcggtgagcggtgggaaatactggcgatatgcgacaaagccgcagacgattccaagcatcgaccccgtaatcacatcgaaggggtggtgacgcgcgtccatgatacgcgatacggccacgagggttgcagctagtagaggagccatgatgacaagggatttccaggcctcaccgcgattgtccataacgtgcaacttcccacctagccagagcgatatgtagacgagaccggcgaaggaggctattgatcggactgtgttagtaatatgaaagactaggagaatcgcaaaaggtatacacacaactactgtgacctggatgaatttttaaggttagcacgtgcgactctgaaaagcagtactgggtcatatcgcataccagatggccacgaccgaaacccgtctgttaacaacgcgggatcaccggtacaaatcgttgagtttgacaatcctgggaaaaggtctttgctaccagcgcgtggttgacaacgatcaataagatcaggtctcggtttgccgcatgcgttcttcagcgcctgtgtaatgacgaacgcgagtccctgagccagcaacagacccaaaataccacaattgagctcccaaagtctgtccttccagcgatgcggacctcttagcttccgcttcccagacgccgcgtcatgtggcttatggtgcgaaaacaagccatcgataaacaaggtgtagaggatgatgagaacgagtgggaaagcaccggagatgcagagggcgtaaggcatgggaatacgttcatgtacggcgtaaggatattggatggagatgttggtgagggagaagtgttggtggaagggctcgatcgtgttgagaatggcgaagccggcaacgcaggcactatttccatggttagtacggagtaaagagaggaattgatgcacgtacataatgatcacatagtcaaagatgtagctgtggaattgttagttggatttgcggggagacctggggaaagtcgacacacgagataacaacacgcggtcgcagccgccgcttggagaaggggagttttgcggggatttccatgctgactccaaggcttccccaggaaattcgaaaattggagaagatcagaagaccagaggatcaaaaggcctgggagaaaataaacatatctgcctagtccagggcattgcttggcatcggcatgaatagcacctggcggctttcgttctgattggccgtcgcaaagtggctgagcttgtgggacctcagggcgggctatgtatacttcgatatccacttggacattaatacctagtacgggtactgctatatcaggttcaatagacagctagcggcccaaattctcatcccagttcgatatggggtagtggttaacctagcggattttcagtatctgacctccgcggccccgggttcgattcccggtatcgaagttctttttttctttccaacctgtttagtacggagtatgctgtggacaactatttcgacggcattgtatgcgtgaaagatgtacctagtttttgttgcccagccgacaaatagatccacatagttatacatattctctgtggtaatctacttaaaacggaaggagtgaattcatatactaatacacaagctgaagggacgctgacgctatgtgcatgcgtctaactttcaagatcaaccagaaatggccatattttcaaattcaccaaatagacggttagcttttgagaaagactacttccgtatagacacaggaccatcaaaatccgaaaacgagaagagaaaaatatcaactacatatcgacgtgaaagaggcgtcaatggaagtttacaaggcataagaaatggccctaggaatcacatgtctatagtcgtaaacagccaaattgcacagattccgcatttagcaagtggtgatgaacaggccgagactgaaagtgctgttagctgatatacaggcaaaagggaaagcgacgagaaaacttacggagaggggttccagtcctcgaagaagttgaagtcggtgctaccagcattcttcatctcataggtaacagactggccagccgggcaagagaaggtagagacaacgtatgagttgcccggggagacagtgatagtaccgaggtcctgggacaccgagggcacgttactaaaggaggttgaggaatcggcaggggaagagagctgagcgaagtcgatcctgccatccccattaaaggtgtaagacgaagtctcgagctggtcaagcctagggaaaaggaacacgaggctgcaggtcttcccagagtcggaatttgggatgtcgaagttgaacacggtcgaggtggtcgaggtcacgctgccgttaagcccagttccagcaggggtatcaggtgaggacgagtcgacaggaacaataaggtgagggatctcatagttgcccgagagggtagtgggacaaccaccgccggaggtcccagtggtcgatgcggtaggagaggtagggctagcggagctagtgggatgaggggcaccaccggaggtagcggggacggaagctgacccagtgggacgtgggctaccagtggggggaggcacggtagcagagccaccagggtgcgaaccaccactacctccgccaccgccgggggaagttgcactaggagaggtcccaggctgcgaactaccgccagtatgagcaggtacggtagccgagccaccagggtgtgaaccaccaccgccggggaaaggaggcacactaacagagatacctccaccgcctccgcccccgccgccaggggaaggtgcactaggagaggcgccaggctgcgattcaccaccgccagtgggagcaggcacggtagcaaagccaccagggtgcgaaccaccgccgccgccaccgccgggggagggtgcactaggagaggcaccaggctgcgattcaccaccaccaccgccgccgccgggagagggatgtgttactgtaacagtaatagggggctgcggcccggcaccaccaccgccgccgccgggagcaggctgtgtcaccgtaacagtaacagagggctgcggcccggcaccaccaggagctcctggaccaccggaggtagggcagctgcagtcagtgacagtgaccgtggtcgtggcagtgtgagaaccggtaccaggagcagggccaggcgcaggaccaggggcgggaccaggaccagcgccaccccctccagggccaccaccaccaggaccaggagcgggaccaggagcagggccaggggcgggaccaggggcgggaccaggaccaggaccagggccagtgccaccacctccagggccagcgggaccaggcgcaggactaggactaggagctgggctagaaccaggaccaggaccaccagtgcccgagcaggagtcggcagacatttgcacattcacacatccagtgacatccatcttgttaggggtagtgtagacattcataccagcgttctcgcccgtagcacatgcaatgaagtcagggctgttatggtactcaagtttaccctgggagttgacagagaaaccgggtgtagcagtcacaccctcatcacactggagttgagtagtgggagctgtcatatcatcagatgcatgtccttaagtagttgatatatagggcattgattaattcacttacgagtgaggatgcacccacggccgctggagtcagtaatgctgccattggcatcgatgcagtactgtgcgggttgcagattactatcgccaatacggttctggccatcacctagctggccaagtgtaccggaggcaccgccggaggaagtaaggtgaaagcagcagctatcagcgcggccaacgagggcgttagagcccgcagcaaagacagcgacggcaatgatgttcctcatggttgctgttcagcgaatatgaataggctgatcagctagtgaatgaacacggcaccccttcttaagaagatcgcgagcaattgaacgacctgacaatatataccggtagagttgtgcaggtggcttgggttgagggagcaaggttttggggagagtgcatctttataggcagcagtgggggttacgattcaaacagaatataacatcagggcacacatggccggcaaaagtccccgagatcaaacacagagaagttgcatgttgtcagccattcatgccaatgaccgtggggaagaactccgatggaccagtaccctggtttcggagagtagacaatagtaggtccgaaccagccggagcgagatgcgtaggaacatccacaaacgtcatgttgaacagagacccaattgattgaggtgtaaagaaatagagtatgaggatatgcttgtttctccactttaaagcaggatctgaagacatggacaatggtcactggccgggtatgagagggatgtagactcaatgttttgctaacgcccaggcaacccgattgaaagtggcaatatgaatcttcccatagatgactgctaatttgagtgctccaagaggctcaagccattcaattgagttccattgttgttattaggcagttgagagtatattcgtcacgatactcatctcatgctctagtttctgatccagtagctagtaatatcgtacatatagacagttatatgatcctagtattgcatcgaacttctccaaaacaagaaataacaatcatttgatagggctagtcgtcattgacaactgtggatctttgtgccatacatatagaatatagtacattgcatccttcaggtcatagagttaaagcaaaattgtgatacatataaaggatggctgctatgttgtacaaaacctggacttgtgtagcaaagtatagaggcactagtacagcatcaatcacttcattcataagtatgatgaaagacgaaaatcgaatagaagacaccgagagattggatcggattgtccacgggtgtcatcattaaacaatatggaagtggacccccgaattggacccgaccaacaacgccctactatttttatatcattcaaccatggcacatttatatacagtctgattttggaattattagccgcctcataccatttgctctgactgttctgcgcatatttcatatgactgagtcttttccacagtgaaggtttatcatactacagcgacgcatgtctctactgtctctattcatcgcatatccgacgaggctcccaatctaggattcattcatcgtgtcacatttctaatacaatatattgttacacagggagcaagatatggatgtgttcaggaaccaagcaaagtcactcctaatgcaacccgatcaatcgatcgcaaagctgcatcgctgccgcataggtttgatatcatgatacagatttgtgatgtcggacaaggttaagattgaaatggcggatttacaatacatagtaagctactgctttcattaacctcatcttgttattataccgtagcgtacggaatatgtttcttcgctgatcgcctccacccgttagtattgtacatatgccgggcaagtttaaaccgacgggccgtgtcgatctcaatgtgagagtgactgggtagctaagtggggcttaatgaactagagtattttacaaatgacgagtcttcatgcgtcataatgtcgtgaatttcaaatcccagtgccgagacctgtcgataattactactaatgctacatagacagaaatgcagtatccgactcggcaaagaggctgttccagtccacagcccctgagtccacattttcatcgaaaacctgccagaggtcatctagagtaggcaatgcggggtccattagaagctcatcgaagcttctgcctgttggatatgctgtgcttgtaggtgctggagaggcacagacaaggcctgaagaagccccagggccttgagcggtggattgagttattgtgttttcttcaacagccgagcccgaagcactgtgccgacggagagccgttttaagggattcaagcagccttcctgcaaaagggagttcctctttagccctttctagaattgaaaatgcttccaaaatttccgtttcctgttcctgccggtgatcactcccagaaaagtctatgaggagaacaatgatcgccacacagacggaatatagtaagcctggaagtcttagccgcattgtcgcaaaggggaccacctctagtgagagttggcgttcggtacgaatcaccattcgagctgcttccaggcatgctctccgtgagtaattgtatgtaggatctttagacgctcgcgacaaataaggcaagtgaagcctgcatctttgggcatgaagcagaaaattgatgatgtatcgttgtatgattattccgggagatctccaaggatcggtgtttggaagctcgtccgaccgatagtctaacgaaaagaacgagggtagactctctgcgaattcacaaatcttgccatcaatctgtttcgtgtgctcatagtccgggcttcctggatctgaaattccaaacggagcacaatctgtgatttcgcggcaaaattcgcccaatcgaatccgttggagacagtacgacatcgatgttgggtcggtgagtggctttccaactccgaccatcccgtccacaatatcttcatcattcgcattgcaaggtttgttggtcatcatgtggcgtggatcaattgaatatgtgcccttttgcgaaccagatagttgcgacatctgcctattatctgtgaactcgcattcttggaagaataagagggggaggaggaatactcaccaatcagtcgccacgagataccaccacactcttctacatatctctgctttcgcagaggatggcgaaggcatatctagatgggaattgtatggatgatcgatccgatgcaaggaaagttctcttccaaacgagatggcagtggaaaccatatgtcgagcttggggggtaatccccacgatgttagcagtcacaaatatgagaatgatcatcgcttggatatcctctatggattcgaagtgtttgtaacgcgagtaatcgaccatctccgacgcaagtctcatccaatgtgtagactgcgcaactgcttcttcaacggtcgaaaatatggagttgcacatgtcacgttcagcccagagcgacgtggtactggcgagaatgccgaggagcaacgaaacgtgcccaatcttgactggcttgctttctctcagattacaatagagttcctctaccatggtatgcactgaggggatatgaaccacatgatggaggaaagtgatctctgtgatgtacttttccactattatcttcgtttcgtcgtggagtggcagccagatacatcttttcatgggttgagctttatgtacgattggttcagatcccactgcattacggatggggcaagttctgaattcaatctcatacttgaaaatattaccctgtacactcttgtcagtcgatttcccatgattttaatttgatcgaggcctaccagtgagcctaacgatgatatctcgccttcaagccaatttaccgccgatgtggatgactggctttcatgaatcatggatgattgattcgattttggggtaggaggagaatggagtgacgaagcctgggtagtatcttgtgccatgggactagatgctggtccattggtgatcactatctcctccaacctccgcaagcggaccagtatatctgcatgataattgctaggcaatttatcagtctgactctgaggactggaaggcaatgctgtagtgggatagagctgacaagtcttgccccgactagtgcagttggagcaagggaattgccggctacacttgagcttccttgatcgacagaaatggcaagataccggtcgcgagcgtgaagatctaacacgctgtttctcgactccatgcattttgttccgaatattgttgaggcagtgttcgttgagctctagatgtggcgagatgccattacggagtcgaccaatcaaatgccggtgaatccgcggaagttccgtgcctccgcggatttcttactatgggaactatgtgagagacacgaggtatataagagcctctctacactagaaaatccatattaactcatcatccttctgtttcttctacaacatagaatcttcttatctcatttgtgtcaatatggactccatcattgctcagatccgagctcttgcccaaaccaccgatgaagctggtcggttggacatgattcagtccctcacacgattgaaaattgagcttcaatctccaaaagatgtcataatggaactggcagtaccggtcggtgggcacacaatgcaatttggggataccggaagtgctgacagttgtagggatcgacgagtgcgatgctccgaatttgtgcagatctgggactccttcgctctctcgcgagaagtgatgcacccttgactgtcacgcaaattgcggagctgactggagcgtctcctctattactaggtaatgttatctgagacgaccgtacttactttgaattctaaaacaattgttctgttcagagagaattcttcggtacctagccgcaacagacatgattcaagagacgggggtcaatgaatattctgcaaacaaggtcactcatgtcttggctgatcctaagggcgaggccatggtataccacgggtaggctacatagtcgcctccatctagcaaacatccctgcttaccagccttctcattagatacgacacgatgggacctgtgttgcaagcaatgcctgcattcttcgctgaaaacaactatcaagatgtcaccgacaataccaatactccgttccagaaagcccacaacacgaaactcacctcgttcgagtggcttatccagcagccaaagcagttcgagcacctgcaaaagatcatgactgcacttcaaggatcagaatggaccgaggggttcaaacttcttgatgatgaagcccgcaaggttccatccaaggtttcacccactgacccacagccttcggagaaacccttcttcgtcgacgttggtggcggccatggccaccaatgcattgagcttggaaagaagtatcccaacctcctaggctaccttgttctccaggacttgccagcggcagtgcagaatctccctccaattgacggcgtgaaggccgaggcttatgactttttccaaccgcagcccatcattggtttgtctccatctatccattggataatatcaaactgactttccttcaattcaggcgccaagttctactacctccgcagaatcatgcatgattggcccgatgacaaagctgcaagcatcctgcgcaatattcgcgctgccatgggccccgactcgcgggtgttgatcgatgaagccgtgttgccggatactggcgctgactggcaatcggccatggccgatcttgcaatgatgacctttgcgggtaaagagcggaccaagcatcagtgggagtcacttgcagaaagtgcgggcttgcgtgtggaacagattcatacttatgttgcttcaactcataccgctcttctcgttttggccgccaagtgagacagacatggcctagagcggaaatttggacttatctagcaagttattttatcactcttctctcttcatttatgtcacgctatcactccgaacgtaaatcttttttgagatcgatgaatttctactgtgcgattcgtagggttgtgtcgacactagaggtaggccttgacttcgctgaagagcttgggcagacgaagagctcaccttgagctgattcgacattcgcacgatttggtggtctgtgacgcggttatggatgtgtggatgggtatttaagatgaggcgtggcggactgaacacgcctaagaactggtaaatctaagtcaagtgcattatatgatctccattccccacctatattggatgctgtagatacattgatagcaaggacccggcatatatttatagagcaatattctttgctagccacctaaattcaaaacgccttgctagccgagtagataacacaaaatggtaaagtcgctgggggaggaagaggacaaaatataatgagtgaaagagaggactagagcctccgagactaatgcggatacaggtcgtgaatcatgtgcgtgccgagcgatatattatgggttcttgatagggtccactcaatggctgctttcagaggtggtcgaatcatggagtatgggtggtggaccacgggtggtagtcgtacgggtggtaatcgccgattctgctgacaccattcggattcccggcgtccgctctgtcggcgttggaggttcatcattgttggtactttggaattgcgactgagtcggcgtcaccggagaggcagccacgggattgggcacatcgatgtggatcgaagacgagcggtcgataggtgggagctgttgcggctgttcagtctgctccacaacaggactttgatatgcaggggcgtcaccccagtccaagtactcgtaatcgggaggcggagggatattgagcatccccagatctccatcgtcgggttgtgttcctagtcggcccgagtcgtgtgtcgtggtcgcagccagggttagtcgttcaagctcagtagaattctgcgattcgctgatcgacgaagaaacggattggcctcggccggatggttcgaaggattgcgcggagtcactttgcaatagcggtcggctgtccgaatcgttcatgtcagaattgtgcgagtcagctcgaagtcgtgatccatcgtggcgaacacgtccaatttcagcatagctaacgctagcgatgcgtcggtcccgctctctctgattctcggtcaggaccgtggatacgtcgactgcactgttggttcctgcacggcgacgttccgtccgagctcgagtctcggcattgagctgctcaaggcgagcaaaatccccccgcgaccgagcttctcgtcgctcccgacggcgcgtttcgcgatcggctagttcctgacggcgctgcaggcgtatctggtacatcgactccatctgttcctcccggcgagtttcctgttcctctgcagtctccgggtattccacgaccatatccatcccaccacgttcaccctctcgggcgataacttgttcggtcggcttcgggctttgggaataaggtgggagggtcataatcgaacggatcgaggtatcgcggcggacgccatcagtggtctgcatctccggtgctgcagccgctccacgataagaggtattttggccagttctttgattcggaacctggccgtatgatgcacttcctgggccccattttttccatttctgcttgaggtattttcccggaaggtatttcggttcgtagtgatgttgtcgcatataacggaacaggaagtagacgcccacacagaccgcgactgcaaatatgacggtcacgcaacactaagagaacaaggtcagcgttaggggaagaggtcggaagggtcggaaatgacatacaataataactatgttgttcttattcgagtcattttgacgtttttgtggaatgtacataattgttggacaggcaactgagcctagagattcttaatggaaggcatagaacaaaatccccggatttcaagagagtcgaagaatgagaaaaaaagacaaagcgcgtcagcctcggagggtctcagaggtggctggctattattatacgccaagcaatgaaacgttggcgtggccctggtgtggaggctggacaacttcggcctgtcctgaaatcaaattcttctttgtaatttacaaagtggcgatgcagttctctgcacttctcgagcattattatggattcatatcctggccctaatccttgttttgactcgtttccccggcgatcattctgcggcagatccctagccgttttagcctgggatcctttatcatcttgaattatttattgacttggatctcattattgactttcgatcgtgggagaagaactgcacgagtcccttgggtgcaagggaagaccttatacaaaaatagatacgccccttgggttcggaagcaaccggtatgagatcgtgctgagcatcatatctcgatcgcgaatcgtcaatctcccaccgttagggttcattagggcctgctaatcctcgaacaatgagaatcacctcgctaacctcggcctagattgtgagatgcgaatgaggggagtattatggtcgagacattgctcctagctcttcgtgccctttctgaaacactccccttcataggtcggtcatctccactacctgttatccacaggctcccattggcctgtagatctatgaattggtcgtgaatccaaggaaagcacctaacctttcagtgccacgagaattgccgtcccaaatttgtccggtggttcatctattttgggaacactgatatggacgacagcggatggcttcagtgtgccatatttctgcgcggctttgccccatcgcggttgatgttcattatggcccgtgccacaaaggaattatgatagtgtcctcggattatcatgttgtgtcgcttggtccagatcatgacgtggtgctcaaagtataagatcagcaacgacattgtccgggaatattgtaatgctccaatcgacgggctgctcaacacttattggtcggctatcatatatccctcgatatctctggtggctgtactatgtgcttgcagcggccagtgaggcgcagtaaatggcagataggctacagccgtggaggggggtgagaatgtgagaatcttggcgaatcttcacctaagaaggcttaagtcttttctaagtcccagtgacacttccttatcatcattttgaaatgaccattgttccttctgttatatataacagagacaattcaggatatcccgtgatcaatggaagagccgtcttactctcacagtgataaggtgtgggaaacgattgtcaggccctaacttctaatgttacgcaaagtgtgactgtagaagcttttggggaagataataaggttcattctctagctacagacatgctcgagaggcccacgtgaccgtatagtcccagtctagcccaattaggcctagtctatatttattctgccggttatattattctgccaaagttagccgatgacatctcaccgcattgaaacccatggccataggggttgaggccgatttaggcttctcttggtctccgtctgaatcgtgttcgatggcaaatgttctgctatatgagcgcagcgtgaaagtctttggagactggggagtgtagctcccatctgaaatattgagtaatcacagagatgttttaccatgttttaccatgttttggaatttctctttcaggttgtttacagatgtgagcccaggggatgctcttgaaaatcctcgttcttttcccagactccaataccctcgcttaagttaaaaccacaccttgagaaatctgtttactgcgaggctagctttctttccttctcactagaagactggatacaaatttcatacgcccaccacggcctctcaaaacttgataaacttatcttgcttttgtaggagaaaaggccacagattagtctcgttttgctaatatctcacgggctccacgatatattacaagacgtggctgagcgcaatgcaggaactgttgaatgtgagcatcaagagatatatgaagtattacacctttatagttgcctctgacctacactataatgccttagtcctagataaccgggtgagtagagctctccttctaaatgagataggcgaggaaaacgccagcaaggacatccttcagactctccttggcggactccactgagtctgtggatatactggcattgctgagtcactggaccaacttcaacctagtcataaaaagcaaaaaagtgggtagcgggatgttaaaaacttaaatgatagagaggatcaaaattgactatatgattggtggaaggtgtataagaagcaagaccctcaggtggttgctgctgccagaggtttctagtaatcctagcgtagaagtatcagttgagagactattcaacacaggaagagatgtgcttggtctacgtcgattcaccataaaggagagacgttgaggatattgacgatgctagattttgttttgctgagcgaagcgaggcaagataatatatcttacgaaatgtctcgataactcagctcacacgagaacggatttctagccaaaattcaaaattccttttgcacgttggtaagcatagatgcgaggagtttgcagtgcctggcccatctgggtaacataccataggacttgacagttggacttgagcattggatctcagtatttggtgaacaagtacattgaatatcactccactccacccatgtggcaagtaagcttggtggggaagatgatgatattatgaaccccttgttgggggtgctaactagctaactatgactaagctgtgacaacccagcccgtgttggatatccaccataccggcgacttctaacgatttatcacctagcaatgggccaacgtcaatgaaacctgcagtctcattggatgcacgaattgagtttgtgacatcgagtgacttcccattattgtcagctgtagaatagagaggtccctaggctgacaaaacgccccattcccccgcccccccgatttgtgtactagtagtcagtagccacttgccgcgattatctaagactcagcaggatacctaactaactagttaggtagatctcggcgcttctccgaacagttacactcattttacctcttgggccaatattctactgtccgtaccatagaaaacagtcctcactttgttcatcaccttatctctccgaatatttatcttaatctgctcaaataagccacaaggctcaaggttatcgtagcattacttcaatgggtatcttcattcctcgggcataaagattgcgataccatggcgtacgtaggtctaccagacccatcgttacaatatatccacttcaaatggacgatttggcgggatcgggatctcgggatccaaatattttgcgggaaagagatcgacgcgcggaacaaccccgttcggaaagacatcagcaagtacaatagcccatgcgccttgttctgtaccagcggggaacacgccttctcgaattgttgttcatcggcgggctagaatactgtattcaaaatctcaatttggaaggtgcagccccagcctatttgccattgccgcaaacctgcttttcggttttcttctttgatactgacttgctcacacagctatacatattacgtacggcctataagcaaaagttcaagaaaggaaagttgagcgtgaataatcctttcccatatgtaagacaggtgtcgatcgatttgacgtgccagggttctctgggtacccggatccatctccgcccgtggagctagcccgtgtggatgaaatcccggggcgagcaattacccgttgaggtaatgtgagacttcaaatccacatcactgatcggccgacagagcttttgggaataaaataggctgtaaaagctggccttgacgaatttctggtgaggtgtatattattctgcccctgaaatcacgcatatgaatacgggaacgagcatttacctgcccaagcaatactccatacaagccttccgattacattgctgatggttgtataaaatagaaaacaagtcaaaagtggaaacgataatcagagccaacgcaagatttagatacaggtgacctttgaatgggaaacatgacaccgaaatcaattattatttgatggttctgggtatacaacatagtctttagtcatatcacccgattttacgtgaagctatcagaacgggtgccggtggctgctgtggtgcgaatgcgctacgggaatgcaagccaagggtgacttcagtgcttcacgtattggaatgtattatattgtaccgtttcagagaaaggatgcgcccagtttctgcaaatcctccatgtggcgtggtatagctgatgtctaatccgacgacccagccagccctgaaagcttggcgcttattgctgaaagcttggcgcttattgctgaaagcttggcgcttattgcttaaagcttggcgcttattttgctggccacgccggatgagaaaccccacaccaacaatgagaccatttgatcgagatgcatcactagactagggagacagctcgctggagtttggctatggcatattatttcgaatcggttctgtcttgactaattgcgctacaacgtatcttgctccagagggcaatgccggaaagtacgaagtctagatacgtaggatcaagctttgatggcttcattgggagcacgtggaaatgaatgcgacgtaacaatgtactcaatagcttcttcattgcacatgaagtcggtctacgaatctggttagagtgcattcaagttgactctgcggcaggatagttgacagaaatattgagttaaacgcttatacaccttgactcaaaaaggaaaatggtgaatttactttttgaaattaatggaatggcggagtaagccgctactgggcaaatttgacttcaatatgtctcaagacatttcggaatttcttggtatcttctccgtctctgggtcggcttcgagatataaaaggcgacatatgtcccagtgaaatgcgaacatatccaaccagacatcttctcatctcccattccaattgtcttacagccatcttccaaatcaggtaagtgagccttgctttccacttttatgagatgttcgacattcttacttgatgttcctagcaggcagccatgttcatcaaaccactgtcaggtattgcgctgcttctgcatgctgcagcacttacctccgcggaatttattgtcaaaattggatattttgggggtcttgttccaggccttcctagcaccgaacctggtgttggatgtgggctttatatgacaggaatcgccgaggggcaggcactttcggtcgactttcttccggaccatcaacccacggatgactgccctgcggctgatttggtactcttttgttcgagatggggatgtccgtttgagacaacatttgaacatcttgtcgaggtcactgtcttatcggacgattccagcgacaaatcgattaccgtgacagggcttgctcttagtggtaggagtgccacggttaagtgcccatggacaccagtgactatcggtagccaaggaggcctcggtctataccaggagtgggtatgcgacctgagtgcgacccaaggatgaagagcaggtggttaagattggcagttggggttgctcaaaaccagctgacgggcaactgaagttttgtttcgtgcctgcgagcctatgttgactgttcaatcaaagtgatgagccaggtggaaaccaaatgtctgtatatctttgtatcggattttgggttacgtgtggacctgatcgtcatgaccgccgggttttgtttgtgccagtgtgactgtctcgtctggcaaatggggatgctctcaacagtctttctctgtttcatttcagcgggtcagttacttcttccatttctataagccacagtatgtatgtacaaatggcttcacctaccctagttctagatcttgagcgcagatggtgtcttctttgaataaattgtcttttgactctgcaggctggtttttatacagacaaggattatcaagcttaacaaaacaagatagaaccccaatgcgtaggctccggcaaagcgcgagggccgacccgctcggaggctaccagtcattaccgggaccgggtaacctggtgaccttggcgacctggcgacctggcgaaccccttattcgtcgggactgacagctagaatttccagcaaaaactcaaaagcatcgattagtcaaattgaagtgtgatgatgattcctgacttggcccttgaccattgtcgtacagccacctttgatagaccgctacttatacatggtggcgaaggtctgaggcacaacattacttgaaaaagaataatccctagcggtgcttagatctcgcttattcacaaatatcaggactaaatcaacccaagtgcagtgccttggttaatataacgttcgtcggatggttttggtaaacacgtggatgctagttgtctcatttgctgcttttggatattgctagacgatgacatgtgatttggaaatggggggttgacttcgcataagttatctagatagataccaacattgtagaaagaaaaaacatcaagctgaagcaatccgtgtaataatgttcaaactccgaggcatggggcgtggttctttcagaacttgggtgctggaaaaaccatgaacttcagtaacatattaattgcgatcgtctcgtggccgtacaggaatatcaaatggtcgtgctggccaataaaatcaaggcgtaaatgacctcacgcatcccccttgaccgaactgagcgaggatatcgcaagtcggtctccttgaaggtcaagtattcggcctcttgatccctgaatcaataggattttacataatggttaactcgaagttgttccccgcataaagagactaagctgaataggtggtaattgaatcacctgaaaactcagcatgatcgcgccgtcccgcagttgcttagatcgacatcggtatatactgttgttgatatcgacacgctgcttgttgtggacgatgatcgatatgtccgcttaaatcagatatccggaccaatggggtccaagctacctcctccgacaaagttgaggtcatcgccacgttgcatcacagggtcttgtcaccctgccctacctggggccatgagattggcatgaattcaacaaagaagttgagcgataatatatatataatgcgaccctgttgcaaactgaaacttcggtaacaccttcaaaccccttggcagccttgtggatcttgatacggctctcctattggacttttacgccactcatttaagatctcagtccacctgaactctcaaacccctcgagacactgatatcgcgcaaaatggcaacattgaactttgatttgaaaaacagcactggttctaacacggtctacgcctatattacaggccaggcgcttgataataacaatgcgcttttcctcttgcgatctgatggtaaaaccgcctactatccgacctcaccatcggccactggggccgctctgagcgaggattgtgcgattccgttgggtgcgtctggcaataccatcaccattactatcccgcaccttgcaggcgcccgactgtggtttgcgcaagacaacaaattgacattctttctgaatcctggccctgcccttgttgagccttcggtatccaacccatcggacgctaactacaatctgatgtggtccttttgcgaattcacctggaatgactatcagctttatgcaaatctcagctacgtcgacttcgtgtcgatgcctatcgctatgactctaaccaacggatctggtgtagaccagaccgtcaagggtctgccagccaatggccttgatctagtctgcaatgctctcaaagaacagaacaccaaggatagtgccggctgggatcagctcatcatccagcacaacggtgtcaatttgcgggcggtttcgccaaacacgggaagagccctcaataattctttgttcgacaattactacgggagctacgtggatcaagtctggtcttactacggaaacaatactttgacagtcaacacgcaagctgccgccggtgatgtcaccgccaaggttgcctctgatctcttgtccttctcagttgcaggtatttcctacaccaagccgtctaccggagacatcttcagcaacagcagtggatcctttgctgtttctgggaatagcaccaaagatgccgttaccgctcgtcttgcagctgcgttcaaccgctcaactttgttgataaatagcgaccagccgaacggggagtcggtttcaaactactacaaaaaccctgtgacgaaccactacgcccgcatctgtcattctgtaaacattgatacccgaggctatgcgttcccctatgatgatgttgcgcctaacgatggcgccgatcagtctggcagtgtttttgatggcaatccaaagctcctgacggtcaccattggcggcggctctagtaattctgtcaagcagtctgccgttgaggacaatgctacgccaatccagcgacctgtggagaatggacaaagcaaggagagtggaaggaagccgagccgcttccatgagctgaggagctttgtgaataagctgtcgcacaggaagagcaaaacctgagaaacataggcttgtctcagcgctatatgattatgctgtcgtatattgtaaatgctaacgtatatatgtgaccttcggtcgtcattctgtcttttgaattcgttggaaataggagaatatgattctatcccttgcaacatacaagagagtaaggtgcctgcaaattgatgacctgcatcgttgtaacagttccctctgcttattccctagcatgctttttaatgtaagcaaccacctgatccggcatagccaaccagggcgtgtgtccggcattaattttctcggtttcaatttgtgcccccttccgtcgtgcccgctccaccaacacctgctgaaccggcaacggaatcgcgcgatcatcctcggtcagaagatatgtagaggggatgttcatatacgctgcaccagtagcgggcgcgttcttagtcgcccaagaatgtggcttcagaagcttgacccactccgcaccatcaggaacatcatggaaaaacagcacgagtggatcgctggcagtcacagttcccttctcttcctggaataaatgtcagtggtcacatagaaagtttgcaaatagaagtcggacaacttacatcgcgcacataccacggcgggggcatcccaccaaacgcgccgatcaaactctcgccaatgctgggcaggaaagcggcaatgaagatgagtttcacgacgccgcccttctggccggctgcttcgcgctctgacctgctcagcccatctaacgcgctgctcactggtaacccggcccagctgtgcgtgacgatgacgatgtcatggccagcatctgcctcctgttgagtgatagatctcacggcctcgatatctgactgaaggtcgacaacagagctggcttgctggatggagggaaatgcgatactgtggcagctatagtcggcgaggtccttgatgattgggtcgaagatggtgggcgggcaccatgcgcccgccgcgaaaatcagagttgtctttgacattgtcgccccggttaatgtgaaagctatatgaattggatacgggcgcttgctctgtgaaatgcaagcttgtaaggctgagaggttgcagtggtcatggaagcgaccatgcgggacttcattttcactttaattttaccgcttttctctcccgtctgaattaatatctcatccacatcgatgatttccattacactcttggttattcatagcagtgacatctttacgtggtgtcgcgggttactcgggtatacacgatgacgcaaattacaatgatattggccagtacaggaaccagtgaaaggaaatagacaatgtgtacggagtatcgagaccaagtctcaaaggaacaacattttgaaacaatttaacccacttcctcggggtcactgagcaaggcatgcaacttgccaccatccatttttgccagagcctggtacggtccatcctctacgacagctccctggtcaagaacaacgacatggttcgcgatctcgatcatttccttcgagtgcgtgataatgataacagtaagcccttgacgcacggccactaactgctgcactgtttgccggacgatctctgcacccgctggatccaagctggacgtggcttcatcgagaatcaagatttgaggttgacgcaagagagcccgtgcaatgaccacacgctgtttctgaccacccgaaaggccaaccccgccatctccgatcacagtattatatccacgaggcagagaggagatgaaatcatcaattcctgctccttcagcggcagctcggacactatgagatgaggctagaggtgagtgctgatctagcccgtaactgatattttcatgaatagtgccggggaaaatggttggttgttgcgatacgatggagatctgtgagcggagagtagggacatgcagccgaaggatgtccgcgccgccgagtgtcactgtaggctgtcccatttcggaggccggagcttcgtagagcgataatagcagcgacgcgattgtggattttcccgatccggatcgtcctacgagcgctgtgcatgagttgcgtgggatggtaatcgagacattctttaacaccgatgtgtttggccgagagggataacggaaattcaggttggtgagcttgattggggtgagctctgaaacaatcaaactaccgaggtgctcgtgggatccatcttgtgagagtttcgcaaggcgaatgagctgtgtcgctacctcacgggatgtgttgatttggggaactatcaaggcgtgagttgagtgcttcgaagtgtttcggggcctacttactccatgagagaatctgagcagcgtatccaatgctgaaaagtagcatcgagaataccatcatcacatcgttcacactgaactctcgggatgctgcgagaaccgctccataatagaatatcaaagctattcaagagagttagaacaatggcaaacaataaataatcagcgagcttacctgtagaaaaaatgactgttgattccaccataccgaaaagcatgcctgtatagatagcacgtttcagccccagcaacaagcaccgtgcggtcgcatgagcttgtttgcgatggaagtgaccttctaaggtcaatgtcctcacggtacggatctctgaaaaggtctccgtaaagacatcggcggcgatactgttcgcgtcattgcatcgtctttcccatagcccatttgttccctcgaagcctcgagtgatgatataaatgacaggtccacaggaaagagcaacaagtgtcaacttccagcaaacaatcaagctccagataactgccatggcggtgattgctgctgcaacgatcacaaaaccggcaaatcggccaagcaggtttcgcatgtcttcgccattttgatcgagggacgatgtgagtctgagagatccgttaccatctttctcaaaccaggcgcgtggttgatcgagaatgcgttcaaaggcatttttcctaaatgaatccatccaagcctcgccgcaaagttctaggaagtaatgcatgaaaaaggacgcaaggccatcgccgaaagacactcctaagacagcaagcgaccatgtcatggttaggtgttcgctgttatttccagcatagaaggttccaaacagctgcgacaggcaatatgagaacaacggagttgcgcttgcgtgggccagtgctgcggcgaatcctaggaagaggatgattcgctgtctgatcgtcaaggtcgaaggaatggtgcccataattcgagagagcggagtcattcgttctttcagtatcttctgctcttttgacttcttgcggcggccatgagatctccggctgcgcttcgcctctgatggatttttcgcggtgtattcattgagccatggagacttcaggctctgatcatcaatgtgaaccatttcgacttcttccgtgggaatttgaatggctatttctttcgagtcccattggggatcaggtccttccgtcgtgaaagaaagacgttggctccaatcttgcaagagcgatccggggaactgttcgttcctgactacatattcctccttcctccttgaggttaagtccagtgagcctgagcgaaaggtcgggggtatgtggccttgaacccaggatgtcctagctcgatgatgtccgagaaacgctgttggaggtctgaatgtatccaagctttccgacgatgagctctcccatggtaagtccatatcatccagagctctttcattcttggtttcaagatggccgtcgactttcgtatggaagtacttctcactctccggactgacctcgacagcgtatctgtaaccggatttcacaatcgaaccctgttcgagaatgtacaggaaatcttgttccataatttgtgacatctcgtgagtgatgatgatggttgtctttcctttccgccactcacggattgccttcattattgcgactcggttggcatgatcgagagcgctggtgggctcgtccaggatcagaattggggtgtcgcgtaatttcgctctggcaattgcaactcgctgtctttggccaccgctcaaaaagcttccaccggggccaacgcatgtgttgattcccttggggagaccattgattgtgctctcaagcatggccaactcaatgggatctttgacatcttgcttagtgacgctttcatgatcctggcgaccgaaggcgatgttcgtgagcacagactcattgaagagaacgcttttttgctctaaaagagtgatattgttgcgaatccagttgatgtcgagtctttggattggattgcggtcaatcaagatttcacccgaggttggcaagtagaaccgcatcagcagttggctgagggtgcttttaccagagccgcttttccctataacaaacgtcgtttctccagcggggaagaaaaagcttgacggtttgagaacgcattgatcgggttgactaggatatgaaaatgataccttcatgaatgttcgttagtgtccatttaaaacccagagaagagttcatactcacgtttttcacctcaatatcaccttcacagtgttccggataccgagttccctttacctcgctgacaatcttgtcttctctccggctctgtattatcgatctcaaggcgacaccagcgacccttcccttttccatcacgatcatctgtggcaacacctgctcgatggattgagctgcggtcagacaggcccagaaagttctgagaacttctccggatgtgagtttcccggcgcgtgcaagggaactgccataccaaaatccctgaacaaacatcccaaacatcatccatcggatgatagcaatttgcagagaattcagccgagcctgtcgaaggtaatgtgtggcagaactctcaatgcgctcagcaaaattccgatgctcgaacgcctgcccattaaggcatttgactgtatcgatattggtgatagcgttgttagcaaccttggaagcctccgtaagctcagcctgctgtgccgtaatgctgaacttcattttggaagacagatatacaataattgccgagaatatgggaatgcccgcaagagttaccagagagaggctccatgatgtgtagaagcccagccccagtgaagccagcgaacggcatgagtattgcaggacaagtccgagtggctgcgatgtcgccatctgcatttcatggatgtgtctaaaattaatattagatataatattttcaacgagtattgtcgcaaactcacgcttgaatccccgataacaaagccccggagccctcacttttggcctcaaaccactcaacgtcgcgctttagcaactcttgaaatacttggctgcgaacaatggaggcctgcatttccccgaatgcaacgaacagggcatagtatgcaccgttcaagaaccaaccagctatccccagcgcaatcattccaaagcaatttgtgatcactttgccatggagctcttcagcatcagtctgaccggctccgaaagatgtgaacgagtcaaacacattgccaaggaaaattgcaagtcctggcgtaacacaactggcaaccacggcgaagatagatccggatatcagagtcggcaggtgtcttcgagtcgtgaatccgaacagtgatttccagcccggattgcgctcggggatattttctttgttagtgtcgttatgatctgaagtcttgcgttcgggcaacattttggcgacaggctcgaacggcacgttgaaggcctagtatgacttgtggagatagtccttgtcgcgctgtagtggcatagcagtgaggtaagatggaagaggatacagatcgacatgaaatggccatgatgggctatttgagtgtgaacccagatacataatccaagagaaagaacaatacttagaaattcccaaatgcggcaatattgaggaggggtgcagaacaaagacacccatgctctggcattgttacgaggcacctgagatgaatgtaccattcatcgacttcaaccttgagacagcaatcatacattgccttcacggttggtagcaaatctctaacagtcaaggaaacatagggctagataacttactcaatgtttgatgcacgatgaccactatcacccgcaatgattgctctatttcgaatcagatagtggctcagaagatagacagaggaccaatggaaatgtcaatttatttagggtatatttcggaccaaatgttgaaagactgtcgaagtcctagcggacatccaatttacatttgagtcgcgattaatggtccgatgctaaatcagaaccacatatttatgggtatgaccacgcttctatcgtaacaatattaacctcaagacatgatactgcaagatcatgtaatcagcattacaagtctcgaggccattcatcatctgcgccacaaggaaacaggcaaaggccgtcggccagatcagcccggacggatgaggaactgtcctcgatttgtaggacagcagcaatgagacacgatttgtaatcaggagctagccttctgggccttctcgtaaacccaatcgttcaggccggcgcggtttctagaagactccatcagtttctatgcatgattcactaagctccaatcagcacttaccgagcgatttcgatagcgtagaactgcatgcgcacaccgaaaatggtggtattttggtcgtactcgacatccgcacgggtacggatcatggtgccaaagttgtagtcctcgatctggtcccacttcatcatccaggtgcgccacttctccttgccctctttgctcttcatctcgtcttcgacaagagttgcggcgggatcaaaatcgggaaatgcctctttgaatgagtcgtaaatatcatcatcctgcttggtcaagtgaagcgtcgagcccttgaccttctccagaatagaccagtatgtcatgagatgttcaaccgctgtaatgtgaaagaatattaatattataacttttaaaaaagctgtgagtgagatgtaaatcaatgcgtggctgacctttgacggcgaactgcttctccatctgttgcgattgtcagcgatcaagattcatcggtctttagtatggacgtggggtcgtacatcctccaaattctccgcctcctcggggtcgaatggtttcgccatagtggtagttgtaatagtaatgctttgagatacaaagaaagtagtaaaggcagtgatatgagaaatggaaaggaagtcaagttggagtgttcggtgccccgcgcatagttttttgacgggcggagagcagcctccgcctacacccatggcctgatcgttgacgtcattccgcccgcagcccacgggtataaacgtcatgttcggctcaattaggtatacctagtataacttgctgttgcatgatgttaggggttttacatgtaaaacttcgccgttctttgtgcattcgaattctgcaagaagcatagaactttcctatgtataaccaaggagaaggacaagtttaaccccacatagaccctgaattaacgccagcatcgctacagagttactatagggtatagtcatagaatgtgcatgcagtgaatcacagctcaaaagcattgcttccaaatgagtcttcaaaaggtaatgctcagtcactatcagcatcatccggtagttcttcgaatcttccctcgtggagagcctgagtcaccgggttctcgacattaaggagaccatttgctttggccctgcgataaataattgttagcaatggctctagatagctcgtttacgatgcacctacctctcaaacaacacaaagagtctctccgcctcgcgctccttctcctccatggtcataggtggaccggtgtcctgtcgctcagcggcccaccgttgtccagtgattggattgcgtgcggtttcagggtcctctgtagctgaatatgcctcgcgtgcactttgtggcatctcaatgccgcgcgctgccaggaacccagcagcgaagccgtagccaatattcttggtgagtttctcggaatccttatctgatagaacaaacatcagttccgaaattgtaactttcagattggtaaagtggcctgtcgagagtttcagcagtctcgaagaaagtgtttcagactgcccaattggcaagcttcggtcagtgtcctcgggcagaagaagcgactgcatatgcttgcggggttcattgggtgccacttcgtggatagcgatgagtgaatatagcaaggggactgcgttttcctctagctccttcgggctatatatggatgtggcctgatccaagatgctgatcagcttgtccatgttgcagttgttgtcaaatgccgggaaaagggggctgctctcgaaggctttgcctttcttttcctccaagtcaaggatagacaatgtgttgagcaagccgccaactaaaccatcaaggggttttgctgggatatcaatacgacatataatcttcaaaatatgagggatggaaggggagaactcggcagcaagatccggaaatatcttggagatgttgtaaatcaatttcagagtgtccgttaatgccagttcgtccatttgtgacaatggttttcttcctgacttggggaactgctttgcatgacggctcaattgctatactagtcagtacagcaaatcaactttcgagtctgtcgatccactaacgtagttgatattttcccccaaggcgtgacttttgatcaagtctttaaagtctagtgtggtgttgtaggtcgcgtagaacaatatgcggcttgtaaccatctcgtcttccgagtcttcggtctatcaaacattagtgtcagctttcgtaccaacaatttacctgctgtagccataccttgagcttttctgctagttttccgccgtatcccgtgtcgacaaaagcctggcgcattttggggtccagtaatagcgcatttgcaacacatcgcaatgccgctcggcgtacttcaggagtctccccctcaacgccataccgcaccaatgtattaatgccctgaaaatgatcagaatccattgtaattctcattttcgacgggcaacttcatctgttgtgctcatacattctgtgaatagatcggttctgcgttggtagggttcgtgccatgttgtcggagctgaaggagggtttgaactcggtctagtagtagatggtatcggtattaggcacgtaaaatggctatcgcagcggactgacctgctgttgagaggttgttctcttgtaggtctttctcaagagactgtagaagctgtgtcacttgttgtagcttcgctgtatgtgcaagctcaagtcagtcaatctactggagattagaaagttccgcgacggacctgttccttgcatctgaagggacgacatgttgatcttagctcggactaagtcgagtgttccgagtacaggggtgatgtaggactgatgtcacttccacctatgccttgagctgagatagaatttctggcacagtattagagtaagatttgatcagatcagtagcttgagcaggtagggcacctacatgtaggtatgcacaagagaataaaaagaaaggagagggaggcgcgcgggaaagtcaggcgcgaatcgtcataaattattcggccaccccccctttaagcttcccttaactgtagcaatctatataacaatgtattcctacataattatgagaaatgccctatcttgcaccacttgattccagatattttgtataatgctttttcgaacttttccgaactccgctggttgcctgaagaatgtggcagtaatatattgaagtcagacatttcatgctaaattttgaccgctgaacactgatcgttgttgctgattactacatactcacacactgaaatactctccaatgcctttgaagctatagtcaatcgcatgagagagtccacgtatggatgcctcgtcgcctcaggcggcgacactttacgcgcatcgcggcgcgtcggaacttgaacttagttttctcagcttgatgtggcttcttgattcttcagtctgaaacagatcatggacagggcctgaacagcatcttattcagcaatgatccttgactattggctcttttcccctttcacacttcttgtccgattcaaatcatggtggagatcctccctgctcgtccgcccacacccccaaggacaacttcgcgcattgtgattgaaaacgccgagtcaccaccagccgttcaaacacccaatgagtcaccattttccgcgttagggtcggtgcaggttggtccatccagccgcagttcgaagaaagtgaatttctctccatggcccaagtacatcaaaccaccaacatttgctagtgccatgaaatcggcccccgacttcaagactatccctccgtctccgaactccaagcctacgaagtcgatcttgaaagcaacccagtcgccaattcccgtttggtcacccaacgtcgatacattcaccgccgaatcgcttgccatgctgctcgaatcagtaatccaacagctggctggcgagtcgatgagctcccgactcgacgcctacatgcaattttatggtgcgctacgcacttataacgggcttccagcgggtcagaagattgccgaaaaattgaatctcatcaccgagtttattcagcgagatgtgaatcgggactttgcgaacggctcccttctcgacacaaaccttgccaatcaagctctgaaattgtcaatctcgtttgtttggaatccggagatttcgacccagctttcggaagagttcaaaatctttctggtcgaccattccatcacttgtctccatgaggccaaggccccaaagtccgttttgatacactacatgtccatattgtctaatcagagctttggacccaagattatgaccggtgctcgtgtagcccgccttttgacagtactacaagacataaataagaacatcagtggcaactcaattgtttctcatcgattgaacatttaccagcggctgctgggccaagccaaatccgctttcatctcccaagcaagcctgtggatggaaaacttgatattcgggctgcttcatactttgaaggatactaggtcaaaatcgatttcatttggcttccaggtggcgacagacgccggtccaaatcctatactgtcgaaaaacatccgggatctctttgaccggccattagagcatgaccgaaagcttgtgtccgagattcgtgagcgcatgactcgaatgatggcgacggatagcggtgagcatgttcctcaaatttggagcatcattatccttcttctccggagcaaaagatggaattttgagcaatgggaacattacaaggaatgggttctcgtactccaaaaatgcttcaattgcagcgagccagtgatcaaagcgcaggctatcgttggttggaatcgatttgtctttgctgtcagccccaacgaatcaacgagccgatctctcctaaaaatgctgggcaaaccggtactctctcaattcgaccgtaagaaggccgacaagtcaggagcaccgcccactcaacttgctctgacaagctactacaatctgttatactacacgtttcgcccttcagcttcttatcagcacctggatattatatgggaggaatacgtggccattccgtctgcaggcatcttctcatcagccccggttctcagtgactgtcttgcgcgcatattggcaaacctgctgtggagtacgcaggctaagatatgggtagagaatcgaatcaatgatactgccaaaatggaggcggaggaacttcctgcagccgacagcagatgggtccgatcaagaattacctcgattctaaaggtttttgagcatatatttaaagcctcggtctgggttgatggcgcggttggccaatctcatgtggcattggcctggagtagtctatccagtgctctatcgattgcgtccagcaaagagatcaccccttcgggggaatcaatgcaagctgttgccagcgtttggagtctaatgcaccgcctttggaatgcagggtcgccctcattgaatgccggcaccacggatgagttcttcgaaagattcagattcttgtctacaacaatgattgtttcgattgggggtattccgtttaccgaaaagcttctcttgagaaatgcggatgagactgagagcatttccatacattcacctcctaatacgacccaagaaagtgctattcttcacctccttcgaataatcagcagcactgcggggacaatggtgccaagccaatcttataaactccttgtcttatgtaatattgaagcagcatgcaacgggagattctcccgaggaactcgcctcgaacttctccaacagtgtgcagaattgagcacttcgaaggccagtgctattccacgagcagctcagctttcggaggtggtttggaatgccactgcccaggtggccgcagattctttgcagtcgttccccatggaatccgctcgtgggcgcgacgggtctgtatctcgtgactacgaaaatgtcattaagattctctccctcggactttcgtttccatcggctttcgaagggtggtctcatttacttgaaacctttgttcgcgtggttcgaacagagaaagggaaccaagcggttgccactatgattgtggaacccatggccgagcgcctcatgtatctttgcgctggagatacttacctaccctcgacttcactgcttggtcattccttatctatccctttcatgcaaggaactgggctagggattgatcgcagcggcatccaggcagctggacatgtcatctttcctcataaacttatcgcgtcgactgcgcagacattacatgatgcatatcacaatttcaacgcatcacaatcccacggtcttgccgacttcatcgaggcattgacttctttcctggggatcggtgttccgcagttccaatcacaaattcttcaaaatctccagtcatcccttggtctctggttgaaggacgaatcttacaaaattcacgttgaccacggcgttgacagcagaattctgacagcgtgccgtgcgctatcgtcagctactatcaatattctccaaaaatcagtttcccatgatctagcttctttgaaaatcttcgagccgattatttgcgccggtttggagtcttcgcacatgtcaatagccaagagatatgtcgaactttggggcttgacctttggctcacagtctttagccactccagtcaccattttacaagctgtacaaactgctagctcgaggttgcagaccgcaacattgcctccgcaagacggtgatcaggataccgagatgtcacctccatctccgcaagacaagatgaatcggtcattgcatcagccgtctcaggacactcagctttcgtcccccgtcatacggaccgaagactcctcggtggccatcaagccaactgagcagttccatgaaccccagttaccgagtaaccttcatcagcccacggatgcgcaaattattgatggtgtttcagtgtctcacaagcgcaagagccgtagtgaaatgttttcgatgattgaatccattcaatcttcgtcgcctgctagtacgccgcggaaattgggcttcgatactcctccgcatctgcccaaactacatggagaatcaaagaccgaacttcctctaacgcccactctcgcccctactgagaatgaagaaggattcatcggctcttctcctactcctggaaccagagacccaacgcctgctatgaactccgacgcactcacatcgggccatctacttgcggatttgggtatggaccctccatcttctcctccagatatgcaatctcggagtccaagccctcggaagagtcgctcgaaaagtgcgcggcgaaaggctgcaaaggcaagaaaggctcttgtcggtatctccggcaaacagtcaacggtcaacagcccggctacttcccatcttgcaacggaaaatatagatacacctatggggaatgcctatgactatgataacgaaaacgccgacactgcacctcgagtaaatggaatgactcccagccggcaacttcgatctgcgctaggtaaaaacccggatacagaagaaccttctgcggtgccactagttgattctgataagacacctgtccaacaacctactcgcagaagtaaatcaagctcgggctctaagaaaaaacgaaagcaatctcagtctaagcctgcagatgatcgacctcaggaagccgcagacatgccttctgttatccctccggatggtttcatggactcgagtgaggagacagagacacaagtcgcatcacagcttggacaagacttggaactagcattggatatggaggacagaggtcatctggagcgaacaaaacttccggacgagccatccaggaagaagagaaagcggaatcaaatggaatcatccccaactatgagaactgacaggcgccggtcttcaaggctgtccacagttaaagatgtggtcagtgtcgagctattgcagcctgatgactcacattcgcaccatgtcatttctcagtcggcctctccagctccatcattatcaccaactgcaactcgccgatccacccgcagttcacaacgaaaatatgctgatgacgcttccacggattcagtccctgcaactcagagctccgttgtgcaggaatcaacacaagatgccgagaccccgcggccgtccaaaaggactcgtaaatccattcatcttgaggaccagtctgtgtctagcaccatcggtagcactcctcaaggcgtctctcgagatacccgctcccgcaagacacggcatcagcaggcgtctcaacctcaaccttcaagcattgcatccgaggaaaatggcgatactgaccgcttgccacctgatgtcagcctagaccggatccccgagagccttattacagaagaccaagcgggccagaatacctctcttgtttcgaccgaagaggcaactgccactcaagtctctgaaagggagcaagccattgagtttgcggtaaaactagatcccgaggaggacatcaacatgaatgccgtccagcaatctggtggaacagtcgagcaaactacaagtattgccacaacgggtactcaaacccaagaaacaccccctgaacccaaatccgacatcagcgaacaaggcatcgtccaatccctgaagaacctcttaggtgaaatgaaaatgacgaccttgtcaccgagcgctttccgcgaagtcgatgatctcctcttcaacctccgttgcgaggcacaaaatgcatcaacgcgacacaatacttcagcatagcgaatggcgtttacagcgaaaacctgttggatatgaatttttttacattggaccccgtctcatcattattccccacctgcatcctatatatctttataacttgaagcacatcccatattttattgtttggcacgcttgatcccaaattatttttcttgtacgttaagttttccgcgctccgagctttccaaacattgaacattatgatcttcgggaagaagtacaaggacaggtttctatggatatttagttcactcactcacttccatatatttccctcggccatctgctttcgctaacaatcaaaacactccattcatagatattagccagttggagtctgacccgaaaggttcaggtacagcttacttgaatgtcatggtgacgcataccgccactttcctaaatagtatatcaaaccagtcctgatcaatttggcaaaacaggaatcattcaaagcttccgcaatcatatgtacatactgacttgactatatttgtccaagccatggccaccccaggcactcagtatatgatgcaagcctgcctagcagccgatatgtcaagctcaccacaccccaagccggtggacccttatctcagcgacccggtcagcatgcttccacccggcctaacacccgactcgaacagccgaatcaccttgcgcggtgtgagtggcaaggatgtacttattccctgcctgagtatcggcgcatggtcatggggggataaagcaacctttgattacaacccaacaagagacctaccgcgcatccacgcagcatgggccaagctcaaggctgttgggttgaccttcgtggacacagcacaatcctacggcgacggtgagagcgagcggatctgtggaatattgttccgagacatgcctcgcgactctttcgttgtacagaccaaatggttatcaacaccagatataaccaacacagtcctgcagtctggcgggcccaagtctaagcttaaagattcgctcgtgcgtcttcaactagactatgtcgacatctatctcgtccaagggcctatacatcctagcaagatatccattgtcgctaagggcatggccggctgcgtgaaatccggaatggcgcgcgcggttggagtggctaactatgacacaaatgaaatgatcaagatggctgatgaattggccaagcacgatgtcccactctctgtctgccagtgcgagtactcagtagttcgtcgcttacctgaagtcagtggcttgattcgagaatgcaaaaacgcagtatttgctttcaagggttttcctcgctagccgagggccgtctttctgggaaatattcgaccttcaatgagccgcagcaaaggcggcgttttagcagttatcccatgcgtatgctggaacctactatcaatgttttaaagagtattgctgaagagcggcatgtgtctgttcctgctgtcgcgctaaattattctatcaataagggcgttctcccactggttggtgtgcgcgatgctggtcaagcggagcaggatatgcaggcgcttggatggcggctgacggaagatgagatcaaacagattgaaggagtcagtctacagggtagaaggtcctcctttatgcagcacgggtaggtattgaatatatgacaacattgcaaaaaggacctctgaatttccttggtcttactcttgtcgagggtctcctcccaatggctttcacgatgtctagaccgaagagctttgagctttcagttagaaatagaagagcagagtatgactctaattgcgtccttactaaacccactctacctatagtatatgtcgcaatcagctgccatgcaattgcgcaacttcatgccaagaaccgcgcccttggcaatcgaaggggtttcgactgtttatcagagatttcacctcatttggctgaaccctgcatccgcctatcatgaccatgagatgcctgcatgtcatctcatatgaccaagccaagctggctaatatttgcccgtaatattgatcccaccaacaataccacgacaaggcacaccatcagcgcactgggatgcttccaagactcttggcgtgactgtcccatcgcaccacccacgaatctaaagatctaggctgagaattcctccccaagcctcttggcatgggtccgaggtgacgggtgcagcaggatgagagggttggcaagcccttggcatcagtcggaagccatacgaaagcgtctctgatctgctacggaggtttctggtcgactttgttactttctttatcttctgtctcttgcaaacagcgtggttctcaccacatgaagttttaaagatctcaaccgcctgacaccttcctcgtctaatcggtaccatcatggtactcgcccagtatctgaagaaggtcgtggcctggattgctcctcctccacaaaaatccgaagatggacgtgatcaatggccctctcgggcggctttcctgttggccgccatgggaggctgcgccggtcagggaaatctgctgcgatacccgtcggtagtctacaataactatgggctgcaatggtttatcccctacctattagctgtgttcgccattgccattccggcccttattctcgagattgcgattggacaagcctatcgtggcgggacgatgatcgcgttcaataatatcaaccatcgactgaaaggcgttggcatgggcccgattttggtcagttttgtcgtcgtgcaatactttacggtcaatttggcgtggatcatgaactatttccgcaactccttccggagcccattgccatgggagggcagaatcgaggaattttatatgggcgatgtcgtcgccaatgtcgatccagccgtgggtaatctcactgctggcaatggtgccgttgcccactataccgtgtaccccggcattgccctcatcggtgagacggtcggctggagcgcatttatttggtttctcatatggatctccatcttccgtggagtgggcctgacgggtcgcgtggtctactggacgatgggtctgccgattgtcaccaccattattatcgtcggtcgctcgtgttcactggaaaatgcgggcgagggtatccgactcttatgggcgacatggagaagcgatcaactagcctcgggcactgtctggcaaaccgccgtcggacaggtcttcttttccaccggcattggtttcggctatttcacttcatatgcctcctataattccaaacactccaatgctgtcatggacgcatttctcatctgcggaagtaacatcctattcgaaaactttgctgcctttgccgtgtttggtgtcatcggctacgtccgacgttggccacaagatggcgagagattgggtgcattcgttgtcggcttcctgaccctccccgaggctgttcttcacatgcctggtgcgaattggtgggctatccttctattctttaccctggtggttctcggttttagttcggcctttgtgatgctcgacgcggtggccacgttagccgtggattcgggcatgaaaatgtcgcggccaatgattgtgactagtctcacgataatctcattccttatgagtttgccatactgcacccaatttggattctacctgctggatggaatcgaccgatggattaacaatgtggcattgatctttgttgtctggtcggagcttgtcggtgcaaccacggtttatcgctggcacgacgtggtgagccagacagggctgcctgcttttgttgtgtataatttcggatactttggtggccagattgtcggagtcgccgtcgcacacggtatctcgaatccatcagctggtgctggcgccgggtttgggttgtatatcgtctgttcaattctttccgtcctcgtcgccacgaccccggctatcaaagccgccagtttctgggggcggaaccctcttctcgcccgattttggtatctagcattctactcggtatgtccccactgctaacaaatccagcaccaacggaaactaatatttgtagggtaatcaattgagacgcgacctgaacggtgtcgttggcggtaatggaaactggaacattcctcgtttctggcccattctactccggtacgtcagcgcgcctattctggccattgtgttcagcttcgcgtatcctgaattctataccttgcgatacgacccgatgatgatcgccgggtttattttggcgcacttctgtttgctcttaactctgctcggtgtggtatttccgcgatactacgatgtctttatcccaccgcaccggagggccgagggcaccgaaatcatgaccgccaatcagcctaaggaacacgactttgtgccagatgtcggggtgtttgactttgaatccggcatgccagagtcgatttcgggccggaagagttctgataagttagatagtgtacattcgactctgccgaagctataggctgtatatatcttgttcttgtcgttaaggtgaagatgagctggttatgatatgggtttttgctatttcaagtccttctccagcaaataccacgagcctcactagtacctagacggtcattagaaatgttagcctgcttgaaatcaaaaaaactcccaatgtcgaacattaaggtaccggaggccgtcaaaacaaaacaggcggggccgataagatccccaccccccgcgcttccacctgaaacgtcaagacatccaaagcatctctcttctccctttcgacacacactctctactttcgaaaatatggaccgatcaaacaaaccctcagcaattggagtgggagcttcccttccgcagcccaccttgtccatcaaggacaacatcattgaagcttcgctgcccactggtcagtcagtgacggtgcacctgtatggcgctactgtgacctcgtggaagacgggcggccaggagcagctgttcatcagtgagaaggctcatctggatggctccaagcctatccgaggtggcattccgctggtgttcccggtatgtgaacgctacaatttctcgatttgagctacagctaaccgccctgcttattctccaggtcttcggtcccccgccccagaaccacgctacctcatctctaccacaacatggcttcgctcgcaactctaactgggagttcttgggcaaatcctcttcggaagcgcccggaagggatagcgaccaaactgatctcactgtgaagttggatttcggcctgtcgcactcgatgctgaccgatgagttccgcgcggcatggccatatgagttcggtctagtgtacagtgttacactcaccacggactcactagagacggcactgcaggttcgcaacgagggccagcagaactttgagttccaggtgctgatgcacacgtatctgaacattgcggtatgataaatactccaggaccccctcgcccctctcattcccttgctaatggaattttacaaataggatatctccgacatccgtgtcaagggactcgaatccaagacctacatcgataagactctccaagcgacttctcacactgaatcgtcccccgcattggcaatcacccaagaaaccgatcgcatttaccaacaactggatccttccgctccaattgtggttgcatctgcgaaggatgaccaacctttgttctcgatcactcgggaagctttgactgatgttgtggtctggaacccatggattgagaaggccaaaggtatggccgatttcggcccagatgaggcttacaagaacatgatctgtgtggaggctggctcggtgtctggttggcagacacttgaagctggagaggcctgggaaggagggcaaagcattaagtcgcgactgtgaagatgagaggatattttgtctcccactattgatctctatgcatgatagttatgacctgaagacgcctattcccaatttcaaattgaagatccgctaatcgtgcggccatatttgatctctagcctcgccttgcttgactatagacagcacttttatacacaaatcccatccaaatttagttcaagatatagatacacatgctttgacgagattacatgtcatcaacacgcaacaacagtcccaattcgccccattttaattatttcagaatccatttctcgtccatcatggagcatttccatgctcaataccaacaggcgaaacacccacaagatcaataaaagatcggcggccctgcttgccctcttggaaagcagccaaccgctcagcagcctcaaagctatactgagggccattgtattggcgtctaccacggaacacccaccaggaggcagtgagggccatcaagccgacaacgatcacactggtatagttcatattttcaaccgtggccggcaacacgagggggaaacagaagaaaataacagtaaccaaaatatacatcaaagaaacaatgttaaccgccatcccaagtttctgtcccatataaaatggcccggggaccatatttccacgaccagacaaaacatgcggaaagatggccccaaagtaggacagcgagctcagcacaataaacgacgagatcagcgcttggaatgccgtcgtgctgccgatatatatacaccccagacaagtgacgagagcgctcatggcgactgtggcacgcacggggcagttcagtgtcgggtgcacttgggcgaaatagttcgaaaagggtgtcgcgttatcgcgtgcaagactccaccacatccgaccgcctgtcacgaatgtcccgatcagcgttgggaaggttgcgagaaacagtactgcaatcagaccgatggcacctgcgttagaccctgtcgcttgtcggtagatctcggcggttgggaaaaagccaatgttgcttgcaaagacagcgtctagatcttggatagagtaaaagagggcgatcaggtacacaaaggatgtgacgaaggctgtgagcatctgcaacattatgccttgaggaaccttgatctcgggtttggggactaaaacatgttagttggtgatttcctttccttttctcctgagtctgacgtaccctcttctgataaatggctaatgcagtctgggactccaaccgcaaatgcagcattcaacagaccagtcataaaacacaccccgtctgaccagccacccgtgttgttgtggtactcagtccacacttgggtattgctggcatgatctttcggcatcaccgtgagaaccacgatagttgtaacgaggccacacatcgacaagataagggaaaggcggttaatgacaggaatgaaacgatttcccaggcatacaatggcacagcacgcccaattgacaatctggaatacaataaatacttgccaggatttccacttcacattcgggtatttgagcagatacatggccacgccctcattccccaacatggaactcatcgatgatgctgacagcagccacgcgcaagcattcaggtacccagtaaagaaccccgctgtgcggccccgattccggctcaaaactgatgaccagtagtatactccaccggcagagggcatggaggaggcgagttcggccaaggaagctgagatggtcgtgtaaaaaatgctgactagaatcagtccgtatagaacagccattggaccgccattctggagcgcagcgacgattgtaccccctgttgaagcccaagaacttggtcctgttagtctgtcgaggttctatcagtgcaatttccggttctcaagggccttactttgcaatgacaatacccaagctggtcaaactccacatcccaaagttccgcggcagctcttgtttgtgtccaagtgcagattcaagccgtacttcatccattgcggcatggcctttcgggggcttttcagtgtccctagaggattgccatgagaacaccgccattttgtcgtaagtcgtgcgatgttagagcgaatatttaacaaagggattgaggcattgcagcaactaggtcgaggaaagggaaaaaggaggtgcatcaccccacttggtttgacagagcatacagggcgcacaggaacaatcaggtatgtcgcaacaggaaaccaagatgtgacgccaatgccctcatggctgccacatgtattacacgaggtccaagcttcaggcgagtagggttagtctctccgaaggaatgcatgtgttttctttgagaccctatatgaaatatggagctagagacgttattggcaatagtatcactatttttgttggaaaaggacccatactatacgtatctacggagtgcactacccaaatgtattacgatcttgcttttgattggacgagtacgaattgtttctcttgtgacctgcccgaatcggagctgagttgatacatcgcagactaagtaagggggattcgcggcgaatgcggagtttggggcgtcgatccgatgggcttggccacatacaatgtacggactactccgtagcttgaggcgaatttcatccagttggggtaaccctccaatattgtgtttcccaaattttagtaggtctgtcaaatatattctgcattccagcgttcttaggggtttgctgcgcgacattcaattagtctgcgccatgcacaagatcgcgatgtccgtgatagatcgaccacatggcctcgcatgattgatgatttgcattatgtataaatatatgaatacatagttatagagtgcagagctttctatgttgtatagggcttcgctgcttggatgaatagtacaaatcctcgtttcttcttttctaggagaatatatatattttcgactacgtgttgacttaagtcttctctatcggtatcatctgaatctaaaagagcctctaaatgacggaatcatccatttgagtagctcatttatagtgtccttgctaatacaataataaatcattatcccaccaactacggacagcccttttcagtagtttcacgcggatgatcaatactggacatgaccggcttcaacttcatcaacaatatacatactacggtgttgtagcaacgtaacagggctcgctggtagatcttttagcggttatgaatggtcttccggcgcgacctcttcattagcgacagacttcgcttcaatcggtgcttcgtttgccatgctagctagcggacatgaaaacataatgagtcaccaaattaagaagcgctcaattaccaaccgaaggatagaagttaaatagagctatggcattcaaaatcggccacatagtgacgcagtttttaaccgtggccctgaggttgtggacgttcttggccttggttaatgagatggccgtatcggaaaatccctggaaaccgagtaatcaaggacattccggtatagccaatgccataagagctagacatatagttatgtttgaaatatgcaaaatttctcacaccgacacgcttccaatcgaccgaactggactcactccgtacggagtatacttttgcactatgaatcactatttctgtaggatgggaacacagccgttctacggatcatattcaatcccttcctgctctaccagctctggactttcgttcatacggctagatttgccgagtttttcgagcagtagcaaccagtagcgcttgtatttattcgttattctagaacttccccgagtgctggaaaatactaaagataccgcagtccggaatacaaccgtacagagcatggtaagcatattcgtacttagaacaggacagatgtacaattgagcaaaggtgcaagttcccatgcactagttagcggcttttcagcttccaaaaccaaacctgcaaatcttaagatcatgaaaattgatcgggaaatagggttccatagggatgaaatgaaggaggttgaacattcatatcagacatgatcttcggtccacgactggcgtgccatgccagttcttattaaccctttctttagttcgcagatcgcgcaagtctattttatggagaatctttgtgtttaggaactattgaatctcgcttggatcgccatgcagatcagcgttccaaacttcccaataatatcagccgcaccgctcctacgtatccactattgggatatgatctgtcaacaagtttgtttatgtatgctcgaggcatggagatcacaaagctatcagcaacgcgcatagggggaactttacggcttgaaatattgaatggcgaccaaggatatgtcgttacaccaatctcgcttaacgcatcccattagagatattcgcgcacaactgcgtcgttctgcacaacactggacatttacagtgtcacgagctgaaccagcctcttcggtcggtggcaggaaggacccaggacacaaatgaggaatgtgaagcataaatcttcttctcccatatctattccatacttcgtgcctactttgtacattccaaagccgactgtcattggccagattggtgcttggagacaagtaaccccttgcgtttacgccccattcttccttgcttgtcagctagcactgacatctcatgggtcaggacgcatgacgccacagccctcggttggtagctttaattccatcttcgggacctaaggttagccactttcaccgactagatgaaatgatcgctctctcggcacagtagtttgctccgaatacataatttgacaatttacccaggctcccggtaaacaagtgatggcgccaattcaaacttgtcgctgatgcttctcatcagaacgcttcgataaattgccatttctcatatatggtagactcgttctatcgcgtcctgacaacttgagaactggttcagggagaaggtcgctctatccctcaagatgggtaacgagtcgcccactccaaaccagcttttcacagaagccatagtcttctggtctatagggcttgttatttatgtcgggagagtgtaggtttgagacgcaagtccggaattagagcaattgctaactgcagtgaagtgtggctcgcataattgccaatgggtcatataaacggttgtttggtaagactgctaatatcggtttgtttcgaattctgctaataagtaactccagtggacgactatgtgatggcagcaacatttgtaagtgttatcatcgccgattatgatggtcacttctttcgacttacccgacggctcctcaaaaggcaatatataccacactgctagtactgattcaaatatcggcccgctacgcaacgaacctcatggaccctaaagactacgacatggtgctagcagacccaaagcaagtcagcgatcggatttatggaagcaagattgtcattgggctggagcaatgcatgttgatctcaacctggggcgtcaagacatgcatgttgatgctctattggcgaatcacgcagaatctgaaatcgaacctctatatcaagatccttgccgtctacgttgccgtcggatttgtcgtcataatggtcacatattatgcagtttactgccggccgttctcacaatactgggccatgccggtggataacatgcagtgtgcgacataccagtactactcgataacccaagccgtcttcaatatttcctctgatgccgtcatgttcgccattccgattcccctccttatcaaagctcaactcaaacggcgcagaaaggttgtcctcatcggcgtcatgagtctgggcctgttcactatcattgctgccattctaaacaaatatttcaattttgcctctcctctcaccacaacgtaccaaatctggtacatccgtgaatctagcacggcaatatatgtcgctaacctcatgtgctggtggccactcctgcgcaagttgtttggtgtcaaggcattccagtacaacagcaaccgagcccagaaacatgggaagcccgacaaccagaacaatgatagtagcggctcctactccaacaactcacactctcatccttcatccaatttctctcgctcatggaagttaccttttcatcgaggaaataaaaacacaacgcccggcaagtacagcggtgccaagggcccgagtaccgaacccatcaacaggtccaatgccgagtttataaacgatatgcatcgtgtcgaagctgtccccctcgagaactggacgacaaagcatactcgaactgacacctcgataacccaagactcacgcaactcgctcgagaaacaatgtgatgttgaattgtaccagaagcagcatgcacgctcgctttgttaacatcataattttcctgcctgttcgaaattgttgttgattgtttgtacgttttagcgcaaggccttggtaatttatatttgagccgaacaactatttcctgctcatactctctacgaaagtaaaaatacatagaattcaccccggatcgacagctcaaccatggtttgcgctgatctttcagagagaattgggtgaagatgaattaagtgagtttcagtgggccgcgtttatggcctttgtaattgctcaataggatcagtagtctctttattagtctcttcagaagtcttctcggtagtctttcaagagtcttgtgtaggtagactgtagaagaaaggaggagagtactggatttctgtaaaggactatcgttgtaataaagctccgatggtctagtggttacgacgttgctttcccatgctcctaatgagcgatatctggaatcaagcaacagcccgggttcgaatcccggtcggtgcatttattttataaatttttttctaatattcaacccttgctagaacttgagttaggatgaaactttggaagacgagataaaataggattgaatttttgatagaatcatggaaggagggatactgttctaggcggtaggcaccccaaagagaatgtacaacatagtccaatttcttagatcaaaacccggggatggatggacaaaataattatgtcagcgtttatctgaacccggggcttatcggtgacgtcgtgttgtcaacagtgaacagctcaagtcgacatcaactctaactcgcaacgtccgttgaacaaagcaaatatgtctgatcaaattccctccgcaactgctgacccagaaaccgtcgaaactgcccttccttcaaacgccgaagatcgcaaggccgccgccgctctctcctccctcaacacaaatgagatcgcaacggagggtgcctccgccggagctccgcttagcgcaaaccaagaagctctgggaagggccatgagtcggctagaaatagctgctggacagggctcaggcaacaagaagacggctgagggaccgaagactgatggactgaaaaagaagacagttaaggttgctccagctgatgttacactgctagtatgtttaccatgtctatggcctcagtgctcgtctttgtgcagccttattgatgtatctaggctgagcagctcgatctaaataagaccaaagccacggagttgctcaaggctcatgatggggatgccaccgaggcaatgaaggcattcattgccccatctgttcaggcgtgttgattcaaattatttactgcttttgacacaatttaatgggttgagtcggaatgaatcaggtaggaacgaaacttcgtttcaacatatcaagagtcgctctttatgctaggggtctggttgtcacaaaggcatgtagacaatggttatcaacaggttgaagaaaatcactcctcgtcctcctctatctcatctttcttgtgttcgattcccttgccctcgtaaatactccacagcatagcccaaccaagcaaagactcaacagctagtgcccaccagacagctccaatcatgttattctcgaggcccaggcccagcccccaaccacccaggaaaggacccatggtccgacctgcactagcaatactctgtgccactccatggactgtgcctaggatagacggatccgtgacacagttgtttactaggatgatagcagcgggcaggataaatgtccgcgagatgacctgtaagctaatgacaaacgtgaaagagggccaaataatccatggtatgcgtggaagaaccacaaggaagggcatcagcacgtatgcaatgggcgaaaagggaaggaacgttcggaatgatgtcagtgtgcccagctttgtctgtatcatcgggtataggaagatctggagtggcaggccgatgaaaccaatgatagcagtagcaagcccaactcgggatgatggaagacctagtccaccgccgaaatggaaaagaccttgccgggagttctctggggcacggggtgcgggcaaaaatacaaatgtcatagagttgaaggcactggtgtggaaggcgagcaggaagtgagccactaaagtcaggacaatgttgcgtgtccagatctggcagaaccctattttcttatgcggccgtggatgcacgcgagagcgggctgggcttgatggcgtagaccaagcaccgaggctgccgtccgtgtaaacggagtcatcgtcgctggagcgtgtaagtggacgatagtgccggggtcgccgggcccaagctcttgtaagccgcttgcccattttacgaccccagtcttttctataacgtgcaatttcatgggtctggacggtttcattgttagcgactatatcagtacggatagggattgacctcacctcatcgagcccaagaaatactgcgagaaatgacgtgaatatgaagactgcgctcaaaagatttggcaatgcatagggccaatgctgcatccaccagacaccgtctttacctccgatagcagatcccgggccgaaaaattggggaaagctgttgataggatcggccaaagtgcctcccaagattggacctatgattacaccaatgttgaagcacatgggtaggagcaaaaacgcgcgggattgatatctaaacggttagctcaagataggatggcacattgtgtgaacatatcaacttacttcttctcggcgatgatctctgcaatcagcgtccgcatcactcccacattgctgttcaataccccacctagtgtccgaaagaccatggccgtcgcgaaagatcgagagaagccaaagcctatacaagacagacaggtgcccatcaatccgatcaacagcactctcttccgtcccatccattcagcatcggcaagacggccccaccagacagcggtgataaattgcgcagctgtaaagcaaccctggagcatacccgcctgggcggagatcttcgagtctggcaaagatggatcaaatgatttgagctgataaaacagatatgcctgcagagaggtctgcgttaacggctctgacagtcgcgccaaggtcaagattgccaactggccctttttcggtagcgagctccaagtcactggtttctcttcgtcttcctcgaccggcccgagcacgccgtcatgatcattatcttcatcaattgaggaaaatcgccgacgacttgttatcagcggcgcggactccaatctcctcggctgggggtttccgaaaattgcggtgtcatcgctctcaagatcggagtcgctttctgtatccgacaagtctacatgatgaccagtcaagtcgaaaccgtcctgggagacaggatggacatattctgggccctcgtggcggtcttggccatggttctggatttgcggagaagtccccatcaacggagatcccggttcgggaagctgtcacgcgagcgcgcctggggtagataccgatcgggtgtatgacacactgttgtgcagaattctaccttggcactttatctccgtacgtaaagcagtctgtaactcttgtagaaaagaaaagtcggggtgaaaaaggagctatgacacaatttcaccccacatttgcgtggggtcaatgcgatgaagaggttgccgagttaaccgcctggccaacaatggactcgagatatgagaccgtaaatactccgggcatgagtttcttaccgccagtctgtcaattcagattttgcatgtagtattcatagtttgtaacatgaatgagtgaactggggtattgaaccttcaagattggaactagcacgaactagtctagattcctcgagtagacaaattcgagcacgatttcaatcagcctatattcggtctatcacgcagccttgaataccacctattatttttccctaatttaggtagattactggcgggacccgaaccacccagatagtcgttgcgtctttcgtcctcgaccaactgtaaagcatgtaagcgtgacctttgagatggccactgactgatagaagatcaaactactagctgtcgcacctgcttggccgattttgttcgtatatatcagcgctgatggtgtgtctgatcaaggtcgccatagagggactcatggctatagatcgagagattcgcgcatctacctcgcgcaaggctttgatcagaaactccttgaaaacccgggaaacaagaataagaatagtatctatagtggcggggtggatagaagcaagccttgccgagatagaggaagtgagtggtgaattcatacgaaggaaataatacaccccaacttttgctagttagggtcagtagcaaatagacaaatgaaataaacaagggcctttgtgtgctttgatcactttgacttgagatctgattagtcgtggttcagacaatcaagcctttgtcgtgtccccgactttccaagtggctccatgaaaggcattcataacctacattgttaactctcgaaatcttcgatcaagtcggtttcgattgtactttcactccactcaccaccgcgtcgagttatcccctcggtgcagctctcatctaatcgtcaatcggctatggtcgcatccttacttcactgtctctttcgatttgttgtgttatttttagagtatcacttcactaacgactatatagcctagcacaggtctactaacagactttcacgatgtccccaaactcctctttctccggcgtgtccatctgggaacaggcctatcacgacgcatggcgacacttccaagcctccataatggaggtcgttgaccggctaagctggcaagatccgtcttccgaagatcgccaaaccacaatcgagaagctaggccgacttccaattgaggtggacaatatccgaagcacgggacaggccatgtttgagcatgtcccaggctgccagacagtgcgaaacgagtctcttacgcacttcgtcgatgaattcatacgggactgtcatgggctccatttcaagctgaatatgctcgtgtggagacttatgaatcgcccgaatagtgacaggacagtttacaatcgtcttctcaggctacttgattacatcgaggatcgggttccagagtgacccatcaattgcggtttgtctgcttgcattactctatatcggtgttgattttgaagattttaacctgaattatcatgaacagtccgcaaagagaaatgccgtacgcttttatgatgttatttggtggacttgttgactggcctggttctatattcccgtggactgtatcactatctgtactgattggatatgctaacagttgagcttataaacagtccgaaaaccgaaaaccaaacaagcgatttaccatacctttttacgagtgaaaattaaaattggataaagacagcgagagacaccggcagtgttttcgattcttttctttttgtaacatatcaagtcagaggtcaatcttcttgttcgcgatagtgccttataataatcgattagcagcatgatcagttggtcagtctatatcatgtagtacttacgtgggctataatttatctacatttaagaagaccattgaaatgacaaaactgcatatgcggcctaatattcttgcttatatataatgaaaaggttattatatacacggattatgcacaagaagtcaaagtttattataaacagccaggcaggcaaatgaataattatgcaatgctctacagggcaagagccagagccaaaacaccagccataccagcaactcccatggcaatgcccccagtaggagcaggggcgccaccagtagactgcgaagaagagggagaagatgatgaagagctggagtcggagctggaggcggagctggggctggagatgatgctggagctcgagtcagagctggagtcagagctggagctcgagatggaggtggagcccgaggcagtggtggaagccgaagtggtcacggcggcattggaggtctggcgggaaggagtggtggagccagtctcgatggcgctgctatcagcagtctcggtctgagtaccggttgccgatgcagttgccgagacaccagcgagctggtcgtcaaagttggaagtggcccaggccttgacgctgctaggcaacgcgttgtaccaagctgggtaggtgccagcggcagcttcactgatgatcacgctgcgggaggcagggtcaatgatttcgtcgtaccatgaggccgggatggctgttgccagaacactcatgattgagctgggcacatccgagatatcgtaggtctcatcgctgtcggcagtctcagtgcctgaggatgtagcagtaggatccgcaggggcggccagggccgtggcggcgaggaaaagagtggtaaggaccttgtactgcattttcaaacgagtgtgggagtataggaacaatatttgttgaatagaagagaaagaaaaaacaagctgacggagggcttaataaatatcttcggagccaggcgaaaccagggccctcatctattagggccgcgctagtactcaactagccaaacctaaccaacgacgctaaccgaaaatggccacaaaaggcttagtcgcgagacttggccaatcacagtgcgcaggggccttgtggtcgcctgattagacccgatttcgacacgagagttgcctgcgttcttcttcgctattcgccaacgattgggctaatttcccatgtccgccagcatttgccctggattgccccttttattgtttccgtggtccgtcttttctgttccaaatttagcttcagggtcggctttcgctaaatctggggtagtgaaatttctatacaaaactctgtcgccccatatggcatatcactatatacataaccaagttcgagaagagcactcatccacttgatcaaagattccgtcaaactcattcaattctaagtaagtacagaacttcttaaataggacgtgacgccttccatacgattgttcatgctaaggttactacttgatagcttgaggaatgaatgtcactagcctgctacacagtgagagttcaatttgaattgtagttggtcaatagcattcccctgtttttgactgaagctgtactgaactccagtagcaacctctatatcgtcacacagaacgatgtgggatagttaaatactatgccttgaatatcaggcattaaggtgagtcatccgagtccgggaataagcgtatcacgtacacaccactgtttagctttcttttgttgctcgtccttgatatattttcgctcatcggtcctttattactatttctaagaagtttccaatactctactgcctattccaactccttacccattgcatttgcttgttactgctggtcaaaccgaagaaatttgacccccccacctttcgggattgccttcaccatggccgaatggagccctagttgtaagagcaaaaatctgtaactctgtttcacatttgatccaatatcactgactatatttagcctggacacaaaagcccatcaagcaagatgtcatctacgaggatgctcaagggttgcaagactcattgcagaaactacagaagcttcctccacttgtgaccacacaagaagtatgtctttccttcagactggatcttagctattatattgacctggtttgaagatcatcaatctcaagaagaacctacgaaatgtcgctttgggcaaagcattcgttctacagggtggtatgtcgcacaagaaaagcatatcccccaaacaagcactaagcattctgtctaggtgactgtgccgagctcttcgactattgcagccaagaaatgatcgaagccaaagtgaagctcttgttgcaaatgagtttggttctcatctggggtatgtcagacccccacaaaaagcaaagaaacatgacaactaatccaccaataggcgccaataagcccgtcatccgtattgcccggattgcaggccagtttgcaaagtatgtttttcattcattaattcatgaccacaaaattaataacaaaactaggccacgctcaagtccaacagaggtcatcaacggagtggaaatgccctctttccgcggcgacaatatcaatggcttcgcagcagaccctgtatcccgccaaccggatccatcgcgtctagtctcagcctacttccactccgcggcgactctgaattatctccgcgcctccctgtcctcaggcctggcagacctgcactccccactagactggggcctgggccatgtaatcacgccctcaatcaaagagcaatacgccaaaaccgtacgcgcagtaaaggatgccctgcgcttcatgcacacggtaggaattgataaagaccgcggcttcgagacagccgacattttcaccagccacgaaggcctctccctagaatacgagcagagtctaacccggctcctccgccacccagcgcgcccaggaagcaccaccacggctcccgaaaccggctattacgcaacatccggccacttcctctggatcggcgaccggacccgccaactcggcggtgcgcatatcgagttcttccgtggtatcgctaaccccgtcggaatcaagatcgggcccagcatggcggcagatgagctggtgcagctgctggatgtcgtgaacccggatcgcgaagtcgggaaggtgactctgatctcgcgatacggcgctgggaaaatcgccactttcctccctggtcatattgccgctgtgcaggcctccggtcatatccctgtctggcagtgtgaccctatgcatggcaatacgcagagcacaccgtctggtgtgaagacccgccacttcacggatatcttgtctgagttgaagcaggcgttggaaatccaccgcgctgcagggtcgttccttggtggtatgcatctagaacttaccggagaggctgttaccgagtgtgtgggtggtgctggtgggctgacggaggatggacttggcgagcggtatacgacattctgtgatccacgcttgaacgagaagcaagctttggagctggctttcttggttgctggattctatcgtgaagagtctgaggagtaatatcatctatttggattgacacgagatatctgaatgttgaagcgggacagcgaaaatatttcgggcattatcatcgagtttctgaatcaaaagtcatgtatgttttgcaagttggcctcttttcggatatgagtaaaaagtctggatgtaaatcatctgggattgaattgatttaactgagattcgaagaaagtagcaacaattgtccttgcacaaaacagtccaacctatccggctcgccgcccatggggcaaaatgcaagaaacgcccaaacaaagagtccccgtatttacagtgactgggtatggatctaataaagcgaataatgtaatgaataaaatcaaggaacgagaggactaccgacggcaggcttgtaaacaaggctcttgcgcctggcagcctctatgcggaagcggcgctgtctcctagattcctcatcttgtccatcatcgagcaaggtactcgcaggcttagcactcgggaatagtcctcgattgctctgctttggcgggcaagattgctggataagcttggagcggttcccaaggaatcctggtgtagcgggcgacatgccaatggcatcaaggttggcaaagttgtatcccggagtagcagggaattggtatttatcagaagaagattgtcgttggggtgtggacggcatctcctgttggtgggtcggaggtgtgatcttgcggaaaccctcaacggcaccgggattgacaccactgcgacgtccgccggcagatggcgcgggagattcagagatgcgcacgagtgttccgttcacattgcttagtgcacgaggctccatactcttgcggcgcttagcgcctccgcgcgggatgatagagctgtcaaccgcgtacggagtttcatcaagccattggttttcccgttcacagctagaaataacaattagaaaagccatgtaaagaaagtgtacaaaagataaacttactcgaggacccagccgactccaacacacttgacaagacccgctgccttcttgactttctcgagagttcgcaggccaccatccttgtatacaacatgcgtgatgccaactctcaagtccttgggctctacaccatcacttggcgagagactggaacgagggttccaagaccaggacttcacacaccgagcacccatttgctgcaaaagttccacaaaaataccagaggcatcctcaccctcggtggtatgaacatccacatgcacgactgctccatgcagagccatctgctcggtgctcatactacgacgtggcttcttggcaggactggcggttgcgacaggattactgagcggagccatcactggtgcttttacactgctgcgtctatttgtgacagaacggcgctttggtgtcggacttctgctcacccgtggaggtttccgagaaggagacagaataggtacactatcgttgagtgccatgaagattggcttgcgaacacgcggagaagaccgagtgggagatgggctcgcgggggacagacctctcttgcggcgcagcttgagaggggatatgtcaccttcagccttcaaaggcacttttgagacagtatgaatggtgcgtaattcgtcgggctggacgtgagccttcattggggttgaaggaagaatcagaggaccacagttctctttgtcatcgagtagatggaagtcttgatcctgatcttgcgggacttgagtgacgcaagtatgctccagttcaatatttcccgagtcaggatcctcgaatatatccgtgcgtgtgcttggagaatctcttatttgatggtcttcataaatggaagatggccgtggagtctgttcataatcggggcttatacaagtagtaccgctttgaggttgagatggtaattcggcaaacaaagagggcgggttttccaaagggctctttgacaaatcaggatacggaacagtaccagaattcgccggagtttccttgttggtgcgatccaaggggcctactaatgaaaagactccacggcgacgcggtcggagtgatctagcttgggaaggcgtattttgttcccagcgaccaaatttttgtgccagtggtgtaaagcctatgctagcctcagcaggggattgatgctgacctgcaacgcttggtgtgttgaagagactgggtgccattaaagcaggactgtcaacctgggtgtttggtttccagctattttcttcatgcaggggcgtgtcaattatgacgttattggcattcttggcatcgagggtggagccatggtcattctctgagttgtctgggcgatttacggacaatggagtagattcgccgaccgcgaaacttggttttgacaaaggagtcgcttgcgtcctttcaagtggggttgtaataccctcaacatggctgctctcatatggtgaggcaggctttgacgatattgtagaaaacgcaggcgcggctaggatagactcagtatcttccacttcgctttcctcgctcgtcacttgttcctcgtcctcgggttggtgagtggcctcttcttgccactcacgctcactctctaagggatgatctaagtcaactgtccgctggacttcatcgccactggtcaaatgcaatggtgattttgagggcgaagcgagttcattcggcccctcttccattagctcttgcatctccgtagttcgcaaaggttctggagtcgattcttggcaccggaatcctgtatcaaaagttcggagttcttcctcctcaatctccttctccaatactgccagctcctcagaataactcgtgtcctccatgactgagtcaacctgatcttcttcgtggtataggtcattctccgcgcggtgggcttcttccatggcgtcaaagcaaattgtgtcaagctcctcgtattcaaattcgctctcgtcagggacatcttcaccctcctctaggtctgaggcttcctggagttgttggtcatggatatcacgcgctgccagttgggcctcttccatggcgtcaaagcagattgtatcggcttcttcgcggtcgaattgggcctggtcttcaggttgttcactagctccgggccctgcgtcttcctgaggctctggatcatagtggtcctcggttggcatgttggcctcttccatggcgtcaaagcaaactgtgtcaagctcctcatattcaaaatcgttctcatcttggagctcttcatcttcttcggaatccgaggcttcctgaacttgttggtcatggatatcatgcgctgccaattgggcctcttccatgtcgtcaaagcagattgtatcggcttcctcgcggtcaaactgagtgtggtcttgaagttgttcgctaacggaacctgaatcttcctgctgattttgatcatagtggtcctcagttggcatattggcctcttctatcgcgtcgaagcaaattgtttcaggctcttcatcctccggctgagccttatcttgaagatattcactttcgtcttcttccagttctgactctccctcggcctccgcctccaccgccgcagggagagggtcggtgtttccatcattggatgagtctggagctacttccgaggcagcaatatctttctggatgggagaaattgatgatccctttccatcagaagatagctcaattccaaagatgtctcgagccacatcttcgaccatttcagtgtccttttcaaaggctgcctcgtctggctggcttgtccgtggcgaggatttgggggtggtgaattgtgggcgttcaaccgtcttaaggggggttccgtcattgtccaccacggatgtatgagtggaaaatatcgagtttttgaatggcgaaggtattctttttgcggggctctgaaacaagggagttcgagcaagggctactggtgtggaagccttgaaagccgattgcgagaaattagcacccaaacccttcttaggtgacatcttcagtggagaaacacgtccgggtgtaaagtcgggtgcggcaattggattcacactgtcccggaagagggaacctccacgattcggggtgtctttcatggagaattggaagggagatgatggcgctggtcgtcttgcggggctagacatgatcatagaatcgctgaaaacaaccgaatttccagatggaagagcgaggtgaccattatctgcgactgcgttctggctgcggttcggtgcaaagttgattttcctgactggggagctaagaccgatgccgtctgatccgtgttttggggttggtagtttcggttcgccattctcgtccatgaagctggacgccttcttgggtgtaaaattgatcctccgtacaggagagctcagtccagtagtctctaaaccacgcttaacaggcgagtgaacaacaagtctgaccaagcccttggtatcgtccttaatggtgttcaattcatcttcttctccgtcggagcttgcataggctgatagagacttggctacctgcttggcctttttgggagataatggttgggccgtatccttcttcgctgcagctggtttccttccgcgagtgccggttgccacaggcttgctaacaggggtggctccaaggccggtcttgccaacgcccgcactcttggtagctacccgtcgacggccgacagcagaaacctcgggcgcagattcctctgcttcggagcccgagacatcctggaatttcactgtcttcttcttggcgggcccacgtagaagatttgagcgtatagttgtcgagttagttgcaatcctaatttggttcgatttcgtctcattcgctgtatcgactgccgcacgtgtccgtctgctcgtggccgtagtttcactggcctgagaggtcttcactattgttcccgctcttggtcgtccccttgttttcggcgctgcctcagccttagtcgtagcagcttcttcgggcaacggattctttctcggtcttcccacacgcttttttggtgcctcggtttctcctatctcatctttgcgggtgttgttctggggttttgactggtcggtgagtgactccgaggaagccttccttcctcgcgcagtcacagttccagtcgcttttggtttggtagctggtcggccaggaggacgtccactaggtcttgcgggtttacttgtgataagccccagctcgtcatcggactcatcatcggtcgggggcgcagcccgtggtgctggaattgctcttcggggagctttcttctttgcatcggcagcagctgtcgatttggttgaagttcgtaccgcccgttttgcaggggatcgtgggattattgcagcgcgcgccatattgatcacgcgttgtcgttggtggtcgcagttagtattggcacgcgacactcatggcgggtttgggcggtcaaatatgatatcggcccgatgtcgcaaggtcgcagattaccgggagttgtcgaattaggtgcatgagaaagcaaggcaaagcaaataacccactgtggaggtggcggctgatcgtgggttgcttgttgtggcgtttcccatagcaacattggcacgtgatatgatctgcaaagaaaacatgcttgtcgacaaggatcttacattttgattcaaggacagattgaattatgaataaaaattatcaaaaagtagcagggtaaaagttgctctgatcatcatctaaaataatcaagaagttcaatccgccataaattgtatgccatcagatatatatttctactagatacctgtataattagtgtagttcagaaaggatctcctactactcctctcaatgtgcgtttattggccttatgctggtctaaagcaccgtgttgcacctgatagcagagctataaccatgtgcaaatgtgtacaagactccattgattaatgatctgaactaggtagggactatcagtaagcccaagttcgaatcaaagagtaaggctaggtttatttgcgaacggagagaagaaataaatgctaaacggaagtgtaaacatgttgattatatgggaatatatgcattgctatcgaattggatccgaagagattcgaagatgtctaggcaaataccaggcagatggaaatgacacgaagaacggctcgatggcacatccaccatgcttggaaaaaagaagtgtgtcaaatggcgaaaatccatgtcgaagctattcgcattcgaaacatgcagtgggaagaagaagaaaaaaaaaaaagttctgttacacaagagtaagcattgccagggcggatacgacaaccgcagacagcatggtaggcaaattcatcgtacccatgctagaagcagttaggtaataagttggatcataattgttcggtgtggtggagttcacagtaccgttccagcagtaccggtcgaaacactggttgcagatatcagggagagtggtacccgtgcgctcgaacgagcggctgaggatagcacagccaacacaagatgtccagtttccgtcgagggtgctgttggccatagtggcaacctcgtagccattgaggatgatattgtcacgctcagtgttgtcggtgcttagttggaaggttgagatgttggactggtaggagtaaggggcattggggatgtacacgacaagaggcgagggtccggtctggttggaactattacagccaaagaaggacgggcgggtgctgaggcccaggttgacgaaggtgttctggtctggaacagcagggaaggcggtgccgttgccgataccgctgctgttcaggctgcgctcgtaggttgcaaccaaggaagtgccgtttggccagtagtagtcagtgtcggctgaagagtcaacggcaaagatgacatcaacatggcgctcgggctggataagaggatgcaaagggacgttctgtccatcttcgccgccatcgacgacatccagaattttttgcgcggcgtacggcgacgagtccgggttgtatttatagaaggggttgggatcgtatgaagcgatatcattttgcgctttgtctaccccgtacaagactgaggtgaaaacgtccttcactaggctggggagcgaagtggtgttgatctggagaaggaactggttaaagagtgtggaggagcttccaatcacaaaaccagcactgtcgaagccacggatgcagctctcgttgctcggaagcgagccaccctcaaacttagagcctaggtactcgaggggaatgaaaccaaagattgtagggtcaaaagtgccaaattcccacgggttgaactcatagacggtcgagttactgccaacgagcagttcgccgggattacggccatccgcaacaacgaacggcatggggtagtctccgtccttgaactcggaggtgtcggcaatggaagaccaggtatagctgagtccaccattgctagcattgaacatttgataggagagtgcgcggcccctgtaaccaatttagcaaatacgcacatgcatcccgataaataggaataacataccagatatcggtgatagaagtatcgaatccagccttcttcttcccctcgacagcctcgcccagttccttgtagtaactggcagaatccaaaagctggataccaccagtatcaggaccttcgaggatcgagtttccaaactgccagatggaaccatcctcgtgcgtctgcagcttgtcgatcgtagtgaagttattgatatagatcgaacccaacaaccagctgcctccactcagaccagcgatataggtagcagactgcagcagaccacctaaatgcccagtagtcgtcgcattggacgtccggctgtcaaaagccttgatcgcaccggcaccgttcatcaatgcacgccatccgccgcctgaaacagcgatgccgatattaggcagatttgacgagttgctagagtgtttgtcgaggtaggcaccgacatcataatcgccgactttcacatggtcgaagaaatctttcatcgctgacagagacttactgcggcggaccttgagccatgatgtctcattggaggacaagtccgctgcgctgcgaactgtcggtcggctcgccgggcagctgacagacgtcggcacatacccgtcgggcgcattgggaagagctcgttgcacacctgcgaatgtgctatcatcattgaacccgccgggaacagcaattgcacctgcgaggacatggtgattagagtggagaaattatttggtagacgcgtgtacatgtaagtaagccaagaatggcgggaaaaaaaacctgcgaggggcagcacttactggacaagcccagagcaattgagattagagcaaaagtcttcatggcggttagatcacaattgtgatcaactgtaactgcgcaagaatcgtagagaaggatgaattcccatgtactaaggggggatacttatgcagcgagggtgaatacttatgcgccgggcctgccggaagcttagccaagccccccgatgtcccaggcagttcacttggatgtactccatatgttcatagggatcacgaatcatcgctgccgagtggagtagagtgatgtcaaatattccgaaaactccgtctttcttcacagactattgaatataggatgaaaaatcagtttgctttcgaggcgcaggtcagatcacagccgccatagaggtaaggctgcccaaatggcgctgggaaggggctgatgccgagagtgtcatgtgataatatcgatgtggccaagtaggcatctgcatttccgcagctttcattggagtaagtttcatgaatggctctagggctaagaatgcctaaaaatggacgcctctcaaatcactccacagttaaaaaggatctggcggaagtccaaggtggatcaaatcgagaggccgtaattggatcgcgtgtattgccttttaaggactgtaatcggatcgtctctactgcctcataggtacagatccaaggttatatactctaggctgttatggcgtggaactgaggctatggatgtcacgaatcgagatcggcactatttgaaaaggagctcagtttgaccttactaccaaatgacattacagagaagcagtcattagaatgaactcaaatttgaaaaaaagctaactaccagctgaatcgattgagatgtgacagaagcgtcacttcactttggaagttcatcatctcaatcgaaccaggcaaacgcaaagtcagcattcacccacgactagggccaaccccaacatggtctcccgggctctcactagcctgcacatgaccctcgggcaagttgttcaactcgtcctcctctttatccaggccccagaactggacgatgaagacggcgccaccgacaaaggtcaagatggcgaagatgccgtagttccaggccaacaaaggggccctggaaagcggtatcaaagtctcagctatggctgcggagacagcgttagtgaacatattcatagcttggacgagggaacgcatattgcgaggtgccttggagtaggcatactccattgaggtgatgacggcaaagatctccgatacagcaaccaggacgtaggatccagtctgagcccaaacaaggatatgacatgggtggacgctgccatcgtcgttggggcaggtgttagctccgaagccacagggcgaagtcaggtagatgtaggactgaacgatagcagcccatatcatggagagcgacgccaaccagaaaccgagggcaatcttcttaatggccgtgaattgaaggcccattttgcgcaagacggggtaaaggagcttgtcgcagatcgggacgaagataatcagcgccaaggggtcaaggttgttcacaatatcgttcgggacgcctttcacggtcatcgtgctagcctgtgcgttgagattgttcgtcagttggttgtaggctagccagtagaatgggaaatagcaaaaaactgcgcaagctgcaaatccacggtgcacttcatccacccatgcatcgtcaaaggtcatccacctgggtcgggattggggttcgatgttggagggcttcgcggtgtcccagaaagtgccatcgtgtgttcgtttccacatgatgtatggattaaagtgccagcggtcgcgcatacaaaataagattgtcatgatggccttgtaagttaccgagcccgccgggggagactggcgatagcgcttgcgaccccaccacatgatgggtggagtagtcaggaacatgagcgtgggaagcagaaaggccaaccagaagccgatatacttctccgcatagaccatgccgatctgaccgaccagtgcgcctatgttgataagcaggtagaagtagtgatagatacggctctgagtgatagtcgggtcgacgacaacacgctcaccagacttcagtgtacgcaccttgagattgacggcaggtatctgctcgacaaccagagcggatatgttgggcttgaagccaccagtacctaagcccatgattattacacctagaatgaacacagcgaaggaggcatcagtattcataatcaccggtggaatggcagagatcaccaaaatgatgtgacctaaaatggcagccacaatagaccaggagatggtcttgtatcgtccccagtactcgtcggcgatccaggcacccactagaggaaggcagtagcaccagagggtgttgaaggtgttgatagcgttggcagtctcaacacccttacccaaagcaccggagaaatcctgagagctagggccaccagccccggttgcgtggtttgatccgggagggccattcggggcaggaagggggagagcatggttcacgaagttagagtctgtgtttcaatgttagaagagtatatttatagggatgtggctatcttacagagaacatgggttccgtggtaggaaaaacgctcgcacagctcaacaaatgcgatggtgtagacagcccagggaatcggagctgagacgcgacgcaaggcattggggccatgaagttcatctctggttggatcctcgtcacccacgtcaaggttgtacgactcggggatgatactcttatcagcgacctcattgcaaactgggttactttgcagggtggtattggcaggctcaacatcacggataacgagcgagctcgagtcccggcctgtggcctgagctgccatcttggatagaataaagattcgaggctagtgcaaggtatgcaggatgaacaataggagagatgggaggatgtgagtggatgagaggaggaagaaaaaggaggggaatgaaaagagagaagaagtaaacaaagtaaacaggcgaggtgaaattcacgtgttgggactgaagtcgattctctcgcgtaggttacccgtagtaaagccataacttcaacagcagtcatgtcctttcttaccctgccaagacaggacctaggctggggctatacgactcaacatcaagtgaatcaatataccaaagcagcaattgaagactgatagatgtagcatgcatatgccaaactatgtaacctgtgctatgatgttagagttttcgttccttctctatagctatagtgagaaacataacatatatgatatagacgatattacctcgtgaggttacaatggcgcaaacattctattcaacaaaggattcttttgaggtcaaattaaccccgatatagtcacaaagtatcatgatcaagttctttgcaggtagaggagcctgcagatagcaacaggattaataaggtattttatatttcagcaaagaaactacgaagaacagaccttgaatgctaatccaagatgtgccattggcttacgtcacagagtgtcctcatcctcatattctcaggcctgccttgacctacagtgtgtagtcttgtgtagtcttgtgtagtcttgatgcgggttgaatagtataagtctacatattattcatccataaagccatgtcttccgctacccgagtacttggccaagcaagcaatctagtttgagactgcttacctatctgggctgggatgtcatcattagacaaacccaaagcataaacttccagcaacctatccgcattctgccatgcccctagaagactatcccaagtgattgcttgttgtaagtacataataggctaagggtaattaaggtattccaccagtaagccaacacacagtcaagcacccggctcgacgtctgattggacccagttctccgcatcttccccaggttcggtgtcagtcccgaactggttcttggcggctaaaaagaaaagacatcagaatgacgattacgaggccacgtacctatcacgcgataatttgtgtctgcaggttaccagatttagcaaagtcattcttttataacatatgtatccccaacatttgatctcttttagattaacccttaagttcgttgagcagcgttgttgggaggtctggtgatctctggtggtctaggtatgtggtacattccgactggatggctggacgcggttatttgtgggaaagtatcagggttcgagttcttagtggcggtcgtacgtaaatacaaggctacgcatgacagtgaatatatgtcattgcacaaccatgagattcgattattgatctaactcgagtaggtaaagattgacatgcagctaaaccttagaacgaggatgaactgttcaaacaattataactgttattatttgggcgatcgacttgtgtctaaagtcatcataggattcaaatctccaaagcggattaaggctatccaagaaaaggcaatgatcaaagccaaattaccaaaaatgaaagcccatgcgcgctatttccgccaatgacccgaaagaaaaagacgcaggacgccatgcaatgagacaaaaagaaaatagtcacgcgcagtgattgaaaaggcaaaattgaatctcggccataaaatctaccatgcggcgtggccaccatccattcgcaggtcacttccagtcatgaagctgctagcatcgctaatcaagaagacagcggcaccacggtactcttccggtcgggaaagacgggcaagcatgttctccttgggccactggtcgcgacgttcgggaaactcgagaaagagcttctcaaccatggcggtgacaatgtagccaggggagatggtattcacgcggatgttgtaggtgccccattcagaagcgaggttgcgggcgagttggaggacagctgctttgctagcgttatatgcggggcaaataagaccctgtagggagaatatgttagatcatcgaggccagccagaagagcggaacgtgacatgaagcggggaaatgttccatagagagaaagaaaggaggggagtgggaacgtacgcgattggcaatagtgccgctcatagaggcgatcatagcgatactacctccgtttccaaagcgaatcatttgcttagccacagcctgggcggtcatgaacacccccgtgacattgacctcgaacatggtgttgctgtccttggctgagtattcgagcgctggggtctcctgctgaatgcccgctgctgcaatgagaccatccatgcggccctcttcattggcgatggtctcgatgacactgttgagaagttctgtgtcacgcacgtcgatacgacggtagtgcaactcggtgccaagctccattgcgcgctgttggatctgctcaaactcgggggcctggtgattgagtggttgttagtttagtgctgccatagaagcgagggatgtagatacttaccggctcttccagacggtcgagtgcgtataccttcgctccggcctccaggagtgcctctgtctgggtcaatcctagaccacgggcagcacctgagaccaacaccaccttcccagcgagactgaactcgggcattctggacttctggcccagcaggacgggctgggcggtaatgggtgcagtgggaactgtagtggtttcgatggagacagacattgcgatgcgatattaggtgagggtagttggaaagtatattaatgaaggcgtcaaagattattagactgattgtttcgcgtgcagatgaagaataatgaggatgttccagtggacagaatcaactccctttaaatacatatctttttgaccggaaaggccagaaaaaaccggactaaagcgactccaggtgtctcgtgaacagaaagaaactaaaggatatcccaaaaaggaaatccagatttggaccaagggtactgcagagcggattgagtccagacttcctggaatgcaggctaaacggctgtggggaggcatgcacagcctacaaataggattaagacatataataattatctacaacatatggagtacatagtacttggatactgcgtcaattgatgtctcaagcaaataaatttgactctcttgtgttctgcgtcatacttacgttccaattttatcgaggggataactacgtgtaattcaggaatagctcatctcacaggccggaaaaccagtcaccaggcatgctaaaactcacgatagttggtttctcgacgatagtgtggcagttcggaaccttaggccggatttctcgtttaggaaacccgtctggggaacccggggatccccaacgccactctgatcttcgactctcaacattctttttcttgatgtttttgcaaaagaaatcaatccagatgacctcccccttgacagagctacacgtacgtacatcatagacaaattgccgagcctcgagccgggtcttctagaaatcatccactccaagtatgtactatccggagtcaggtggctctttgcagatcgacgagagcccctgccaatcaaattagtacatatggcctgtgatatcggttcctgtccgatcgccccggctccaaggtgacggcccggacgaaaagaaattcattggtcaattcctatattaacgtccaaatatcttttttctaaaatgtagaattcgaaatatcagatctcggatttagactaggatgccttagtcatcagtgaaagtcgatgtccaagtcgaatagctatttccggatttcgaggaagtacagatctacaacaaaattcggactcgaacatcgaaatccgagtccagactttgtgctgctactcagaccatagcttatcttgccataaaccctgcactaatatccattatcaatcagccaaggacagcacacaccttgtgaccatcagaatcttcattcccagctccttactcaatggggagattccgaggtttccactttttcttctgctctcgtgatgtctatataccagctagatttagcctctaccatatcggtgtgcactctgcatacttccaaggttcggccgcgtgtccgattatggcttgtttgtacggatccaggggccgtttgtttgtcggaatctggtctgggtcttcttcccccctgtcgtgcacttcccgggcccgccccgagtggctcggaggtctcgcatcccacatgaagtgtgcgtggggtatgatatgcacgggtcaatgctgtcggtgaaaaagtggttagctgagaagggaaaaatatctcatcagttcggggttcctccgttgccgccggaccctatctttttgtcttgcgcgactttgaataatgagccttgacatggccaaggtattttgtacctacctacttcctatgaacgtagtattataaaatgatctgtgtagcattgtgttgcacttactgcattcctcttttcccctcttcgttcatttttatattcttactctagacggccgtctttcaaaatcggtgtaacaggatttcttacgaaaaagttgctaccgcaggacttgttgagcccagctgatcaggtacatacacatgaaagaatgggatttaggtactgagatgtatggtgcgcagttagattaacaacatttggaccttggaaacacggaatcgagaataaagcttagccttagcattccaggatcaatgaagtcaaataccgccaaggctcctccggacaatgccatgcgaacattgcaaccgagggaaacccagtggatcaagcggggcctgtcgatccgtaggttaagttcaggttaaggataagcatctgcatcccgtgcaagggtagatcgcgatgatcataatcaagtggggaaagcaatttaggacatcagatctagtcgtaccaataaccggtctagtcttatattcccaaggctacagcaccgttccaaggaagctaaaatgaagtcgaatggattggattatacatattaggggaaatacctggtcaatcttaacaaaatgcagatgtcaccccaaaataccgaaggatccctcggtgctatgtgcatttttttgttctctttcggcttccgtacaagtacaacccaggtttgagtaacatcaagggatacaaaagaagatgaaaaacatgaaagtgtaatcccatcctatgcagattcacatgagaagaatgaaataaagggctgtctagccatagtaggagaaatatcttcaagaaaatgagggagctcaagcatacacgcattcatacgtgagaaaacaactccatgtgaacgccggttccaagacaaatatgggagatatcatgagatgcaaaagggacgcagaaccagaagaaaaagggaagaaatgcaatgcgaatggaccataacaatcaacaaaatccggttgatttttgctttttgatttgcttttggtgttttcgcggagctaggcttcacggtaaccccaaatacgtttttgttcactcacccaccacttgccaacctgctcagcatcattgagccaatcagcggactcttggccaaacttaggcttaacctctttgatgagggccgcgagagtccacgccttggaggggtggttttcaccggggtcttcgctgaggtgagtgaatgtgtactcgaagccatccttcaagggcaggattagacggtagggaacgtcggctgccatgatggacagcatagagccaccagcgttgatcaggcccatgttccaaacggagcgcttgggtgggctctctgggtgggagcgggcttcgacctgggtgtctactcgctcgtgctctgggtgctcatgtggtggaggatggtgatggtcacggcggttgggtggttcctccatggaagagaggaaaggacggatgagggactggccttgatactctgggaggagggcagaggcgatgccggagtcgcgctcgtctagggaattagactggacgagaagatccaggatggtagggacaatggaaagggcggttacgttggcagtgatgtccactcgaggcatgtgcgggtggtggaaaaccaagggtacgcggaagttgctaatgtggccattctcatacgtgccggtcatgtccttattatcttcgccgaaggcttggccatggtctccgacgacgacgactaaagtctcgttggcaatgccagtctggtcaagcatagtcattatatcgccgagccataagtcgacgaaccgggcggaattcaggtagttgttcatcaggtcatggttgatgcttccctggtcgctcatgtatggttctttctcgaagtcgtctggcgtactccaggggtggtgggttgtgctggtgacatgtgaaaggaacatgcgggtcttgttgtttgcggcctcctcgaagaggtctaacacgtagggtcggagctcagtctccgcaaatccgaagtagttaatctcttcgccctgagctttgtgtttcgagtgaggggaaagcagattgctcttaacgaccttgtgcttgaagcccatgttgttgttcaggatgtcctgacggtcatagtcatcggtgattgactgcatgaatacagacttccaagggtttttgagagccgcggatttggtttcagaagaagagttttgcaagcgcttctcgggttgcgacttgccctggttgaacagatcgaaaatctgtggcaagcatggctgataaatttcgagcagagactcctctagaaggtccactggcaaagggttcacaccacaatggcttcccaaaacactcttgaaggtcaaggagctacccgtcacggcgccacgcacattaagtccacccataccttcttgtggcggggtcttccatggagaatggctcatgtcgaccttgtttcccttgctatcggttgcgtactcgccagtcaactgttgagcgaccaaggtcatgttgactagacgatcgattgcctcgttgactttctgcttcttatgagacgcaagaagaccatcgaacaagggtgtgccctgttgtgtggggaaaagttccttgcggccactttcgagcgttaacagcactatatggttgacctcaactgagtgctctttgaaggccttctgcagcggctcataaatttcaccgcccagatttgtgaccatcagcgggtcagtcttggggtcgtagaatgcactctcatcaccggtgcaaacaaaagaataatgattgtccttcactgcacgctcgctcgggctaagatcccagcggctgaatccttggggtgggttctcggggagccatggggctcgtgaccattgttccacaaaggtcgagtccggttggaactgaggacgagagaccccattatcagccgtgagagggaatggcatggcaggctcgcgacatccctccaccgttgccgtcttcttctggaaagcatcgagcagtgtcaggggcagagctccggatagatggtcatacggtatagcgggccgagttagttccaagaaaataagcgatacacagattgcgactgcgggaataatgcgacggaatgaccggaggtctatcgaggtcatgcaggatttgctaggggcggaaatcaatgtataacgcgctttgaatccccgtatggacaggtctcggattgcctgcaagccaagaccggtgatgttgtacaaatgcgaatgaagcaaccacgcaatgagtccgaggacggtggccgcagcggatacagtcgagataccgctgaggagaattttcatggccgccggatcgcttaggaagctaccaccagctgcccaggcgacctcggcaccggtctgcataaagaatccgaactggatggaggaagcaccccatgtgatcaagctattattcgtgttagcttgtattgcgcaaattcccccctgtcctccatttcggtattcggtattcggggtaaacatacgatagtgcccctcccaacccagtcgagagccattgccatcgaccatctggcgcatggaagcgtaacaagacccgcacgaatataataacaaacacatctggtagaatgagtgtgggcgaatagaggacgaagtagaggaacggtaaggagcgaatatgtagcgcaatatgtaaagccttggaggcgagaccgctcacaacgagtgtggagaaaaggaagggcgacaacggtggtaagagggcgaagatggacatgttggaatcatttcatttgtacagtggaatcgcgcagttggcaacgtagggggagaagaagagtcgaagaatgtcgaaacggcaaacgagagactaggcagcaagaaagagagaacagaggagtggtcccgggaggaaagggaagggaaagggtccaagggttattcttagatatcacgaaataacagaataaggccaattaggcgatgggaaattgtgcacgcgactagactaagcggctccaaatttactccaaatgcttggtttcgcttctttttatttttattctgtgtttttttttcattacgtcgccgaaaccactcttcccatccggtcaacctctcatattgtccctaagttgcccaagtggagaccggagaggctgtacagattattatgtcccagtctgtccaagtttatgcagccactaggtggaccctgcatcgcactattcctaaatgattcgctttcgtgagaccgaaaataaatgatacagtacagtacagtaagataccaatttcatcgaaccatggaccaccacagcccgaggtcatgccaatcttggcaggttccaaggttcggacgttacttcccaaggttctgcgaaaagggggaacattcaaggctgtctgcctgggcacttgtgcataaaatccggggaaaaactcaagatttgcgccgatttccggtttccccccacctactgtatgtacattgcccccttttagattattattattaatgatcatcccgtgtctctgagattcaattgtggatagtccgcggatagaacaatcgaactttgtctcggaatacatctaccctgtacattgatgtgtatttatatgtacggagatgtgcacgtatttggccatgatccaggggtatggtcggagactgtgcacggacctttgtctaaatatgcttggcggtcggccttacagcggacgacctgtatatttaatatgacgactcggatattgatcttgacatgtgtgatcttctcattcggcttgctgaagccaagtacaacatacatactccatacatcgtattaactctagtgtcgacacctggtcccacgatcttacaaagtaaatataacgcaaagccagtaagacctggtggagtactccgtagagacatttaaaagctaaatgtgaaacatatttacctactgtacagaaccaaaaccgtgctagtctacaaagtacatactcttgaaagctgagatttgaactgaacacatttccgtggttttatatcatttatgcatatttctcattcttcatgatcatcacgtgcaacggcaaccacagtacataatatcttcctaagtcaattacaccactttctgctgatcctttatggcagcacgctccctaacacaatcagcaatacccctcccaacgtccgaccccaactcttcaaacccttgcacaaccccctcccgatccccttcgcccatctcctgactcatcttaaacttcccctgcaatcgctcaacacgaatctcaatgccaataatattcttcttcaaaagctccacataattaaccggcgcatcggatacattccatgcgctcttcttatcacccccagtataccccataatgccctcttcagactgccgcgacaggtcctgaatctgtttctgcaaaaacgcacccgtttcttctgccttggaattgcagtacacactaatcttgccatacgcctgcacggcggagtagttccacgtcgggacgaccttgccagagactggcttggttgctgtgtagaacttgggcgtcacgtagtggtggtgtgggccgttgaataggatcagcacctcatccgtgagctcgaatttgttattccctgctgcgttttgctcagcgagggcttccatcaaggcttttgcttgtgggttctgtttggccatgtggccgcgcaggatgccggtcggggctgtgtcatcgccctcggtcgagggaggtacatcgaggacgaaggggacatggcttgattggatgaatgagtagatcggggatttgatggccgttgttatgatgccgagtgggttatcacggatgaattgctggaggacggcgagttgtccctcggcgtggacggcgcgaagatacattgtagctatgacttggagaggactgagagggaagtgtattcaatcgatttgaagtaagtataaaagagaaaggaacactcgtataagtatgagggggtttatcactatctatcatagcatagggcgcgatttagatcgcatcccactcaatctagggctgtcatcttgtctctctgttgtatgattggtagtcggcgccgaattatcgacccgaggtccacttttctatgataaagctacaactttaaggttctagttagttagttttctgtgttttgtcagcttggtgactcggggttgtcgaaaactggagaccaactgctcgtcatagtaacaaagtgtcaagatcggtagtgccaagagctctatctagagccaaagccaccccgcattctgggcctgagagctgcgtattctcacgattttatacagccgtcctgcgatatgtcagccagtttgaacttgtccgagcttgttagtatgcaccgcctggtggcggacgctggctggaagtcacattcttttaaaatatccccgatgtatcattgcgaagattcgcgcggtttcgattggcaacagcggctgatggccaactctattccccaaacggactaacagcagtgcctgagataccttccccgagggatcaccttcccgtcgaagttgaagagcctcacaccttaagaatgctgacctggccaatggtaaaaggttacggcctgaccttaccgtaccttggacctgtggtcaagttcgaatttcaatcaatggctaccctggcattccattcttcgcttaaactggcgtccaatgtagcggtttcggcagctgattgatttgaagtcaattataatcgtgctcaaacactctgaggatcatcctgacaatcgtggaaaccccctttctcattaatcctgagggttcatcaaccatttttaaattatcgagctttgcgtcttttgagccgaaaactgaaacccctagagaagattttcataacgggtttaactaaagaatttgatattatcatgagtagggatgagtgatatacagagtatgcaggaagaatgacgccaacaaatgatcccaatgcaccaaagacaccgatcgatattttggagccaaaatcgctaaaacaaagagctcgcctgggtaggggacaaatatcatgtgatacgcgagacaaccccatccttccctaaccgatccaagacccccttcttcaacccgaggaaccgttcaatatctccacggcgcttaccctgcttatcccgcatcgtcaacacctgttggatagtcacggcatccaggaacgatctccccggatgacccgcatgaccgaagtgctcagcttctttatccgcagcctctgtgaggcgttgtcgagcagtgacgaccagtagtgccgggttagaagcttgtgggaagacagtttgcattgagcctcgattgaaagtgcttgagtttgagtatgtaggtgatggatcgacggggcctattgaccggagggaggcggcgaaatgggggtctcggccgtccatgtcgatggctaaatggtcgttagtttgtttccttgctggtcttgcattcacatgtagaagacttgaataaatcgctggcgagtgtacgtaccatcagacttcacgtcggatgctttctcctttgagtggtattttgggccctgggaggaaggtgcaggtgtttgaggaggcgagggaccagcgttgggtttgggcgcggaagtaggcgtaggtgcagacgctgctttggtttcttttggagctttgcgcggtcctcttggcgggggagccggctgcttggggtattggcgccgtgaggctgcgccagccgctgatttggcgggctttgaagcagcagaacccattgagaatgatgggctgtggatcgaaaatgttggtgtaaggcgttgcagctttttgcggagctttgagtggaggttcccgatgtcgccttggcattacggcctggacttcgggtcggtattttgccagcagaacagtcaagcaagacttctcacaaacccgagtatgtaagtcatacaagttggtatttaggaacatgtcaagcagaactaaagacggtagacattctcaaggatattgaacaagctcctgttgagatcaatggcctgatctctgaggcaggattgcataactatataactataccgtcctaggcaggcggtaaagaaagcggtctatctgtcctgacttgtgacgtcaaaaatacagttaacaaacagcttccttgggagtatgagatatgtatctagcgagatcgcctaggtagagcaacacatactcgtccgatatgtctagaaatgccaaaccaaatgttgaagggcgttggcgggcagcacatgttagcgcagctacttatctggagagtccaacccaacccgtattacagacaattgggagatgatcacatttgaagatcggcgagactttcgtgaaattccagtggaagccctgttatgtgttttgcgaaaacatactaggtatcactgcagctaggatacaataccaccggaacctaggaccacacggcagtttggcagcaccgtgagaggacaaacaggaccacggtagataaattcatgtatgttccggaaatctaccggagaccggcaaggcgccggccctgcacttcacctagcgcgcggctgccactaacaaatgcgatcacaccaacaacagccatcgcgggaaggaccttgaacaagttccacgaggtatagtagaggaagaagatcccctcaaatgagatcaatgatccgaggaagacggcatgcgagagaggggcagacttgaatgcggagggtaggtggttgacgttggcgccgagaaagagccactagagacaatctataagcaacggtcttggcgcagaaatgagatggacttaccaagccagcaagagcggggaaagcagcgccgaccatggcgacaaatgccaaggttatgacaattggcgggctagacgcagagtccttgaagatatggtggatctcgggcttcttgccatatcgctcggtttcaacggtcggcacggcctctccggggttacgatcgatcgacaacttgaacacagagctgtcgtaggcatcggagcttccaaacccgccaatgacaacatgcgcatcaactgggccggacagagagaggaattgaattggcaggtctttctgggtctggagggcatgtgttagctgcgccgcggaaagtcttttggggattgcataccaattcgactcttgacttgccattatccttgatgttgaaagggtatgagatatccaatccagtctgagcatctttgagcaaaaggaaagcctggtctgctcgctttggagagctgtcttcctgggctgtcaaggtgacgcgtaaggtatcggcaccgagaagggagacgggcttggagagcggcttggatgcagtaagtctagtttgaacacattgattagtttcatgtaccctctacttgagtcagaatacatacttttccttaaaacctccattgacaccagcaccttttgattgaacggccacggtggcatcagtaaagccccaagctgcggcggcagcaccaggtagggtagctgcagccaataggcaaaatgggacggtggcctgccacagatgcattgtgaaagaaataacagaaaattaaacagaaactaacagaaaacagctgtagagagctcggggagatggtggaggatagaggagttgcagaataaggcggacaagtgaagccgataagcgccgatcaaccatagccctaatttcttttctgtcgacctcagcatcttccatcactttatttcgccttatctcgcacaaatacaattccaacgtccgcctagtccttacaagcttgtttatgaacaccctagaaaacaactgcggatggtggtacctctgatttcgtgagttctgcgcctatatgtcgggccctaattcccaacttctccctttccgtgcactgcggtcttctgacgtcgaccctgcccttcacctgatgacccccctataatgttatccacgccctagttgcctggtattggaggtatgggctaggcttccacttatactgttcattcactctatttactgcccgttctattcgcatggatagattatactgacaaattgcgggccatttagctttaattcacgatgcctccaaagaagggccagcgtaagtcaatgcctgcgcgcatcaataaggcgcctacgttgtcaccttcccggcgctctccccgcgtacctcgcccgtcaaaaagtacaaatgagagcatacaacccgccaaaacgttgaacacatccgccagtcccaaagacagttctagcaacattcttttctacactccgaattcacctgttacaaattcaagttcacgtggaacgagtcccgaaacaccatcctcgcgtcggcgggcgttccagtctcgtccgtcacggctctcaactgtttatactccagccctagaagccccggccaccagctcaagtagtcgacggacaagaagaacagctgcacttgaaacaccccagaaagaagtatcagatattgactttccagagagtaatggtagcgccagctggacatttgaccagtacatgggcagctttgaatccgaaggaacagccgatggtccctccagccctaccagtgcctccgacatgcggaactcatcccgggttcgcaagcccaccatcagggctattgaatcttttgaatcaactaagaagaagcctcgccgcaagaacatgacagtgtctgccccgaccgtcgaaactcctgcccctgcggctaccaaggttgcaaaggttgcgaagaacaatgtttcgaagcagccaatgagaagaacaagaaggtcaaagagaatgaccaacttgaacatgcgaaaaaatgctgtcttgatcggtttcgatgttaacgtgaaggcggctggccagagactatatgacttgactattcagtccttcagccctgactttactccccctttgaatatccctgtattcttggagcaacagcgaagtgaatatttccgtcgccaagatgaagaaaaatatggcgtcgacatgcccgccaaagccacgccgagtgatgtcgatgtcgatgtagatatgatcgaccaagacctcccagcgcctgtgatcgcttcttcttctcccaccccacccaatccccccactcctcctactcctcccactcctcccaccgcagtcatcgacggctcaagcatcctgagctacaagaagcagtctgacaccaaggtcggtagcgatggctggattcaaactggctacgttaattccagtggtgaagaggttgctttgctccccgaaaattgccatccatattacccgtcccatacttacggctacgagggtctcccttttccaccagtgcgcgccagaaccagccagcaggccgatgccgatgccactcacagcttcgcaccgctcctaggagaccgtaacctcccatctgatgcggtggccccattcgtcactgaaaatgtggaggaggaaaaggctagggctctggctcgggcccctgtgccaacccttgcgactaagaagcctcgtgcccgaaagcgccgtcaaaccgcggccgccgatgagcctgccgcagcggttcctgctgctactacccccgagaccggcgcacgcaagtcacagcggcgccgccgccagaccgctcctgcccccactctcctgtctcccacctcttcccttaacactgcgaccgaggtccagtcttcgggcccggctgccgccgtcgcccccgctgccatcgaaggcgataaacctaaggtgcagcggctccggttgactttgaagccggcgcccaagactgaggcctctggggttcgagcatctgcttccaagaaaggccccgccacgcagtccctttcctcccccgtcctctcgcattcgcgtgcgccgtcctccgcaccgaccaacaagcgccgccgccgccggggcatgtgaggccccggtgagggcaaaatgatgaggcattctgcccggctgatgtcgggcgatgattatcactcttcgttttcttgttttttcactttcgacctttttgtatgattgattaccagcgggcgttttcaagcatgtatgattagcatcgcggggcataccatggagttaatggtgaattatgagattttttagttgtctttgtccttgccattagtattgcttcatttcgtactctttttgccctcgtggtcctcgtaaaaggtagaatctgacatgtcacacgggtcgactttctgcttacttttgccttacatctgatttactttgtgcgttcattcgcacacaaggcaggagatgtcacctaggcacctccctcatctcttctttcgcttttctcgctctctagttacctccaactttcatcgatcgaccccgggatatggtaaggatgactcattacaccacaccttagttatccaaaacgtacttagactatatagtttcggatgccagaaatgtcgtcgataccatttcgaaaagctcatgttgaccactatgtccgatgactcagattcagactccgccgacatcgagtgcttccgggcactacccgatgacacatgaagccatcgggtcagaggccaacgctatccggaggatcagaaaagagcaggaggaatttcccttcagggtgatcaaatatctgcgtttcacaaatgccccaccagctattgcggaagagttttctttgagctctactcgacacatgttcaatcacgatactcgatctatgattataaaacaaacgaggaacggatcgagtaccctccgaactccactccaaacacacggcgattgtacgacgctttacgtcgacttgtctcgctgcaacagtacgcggatatgacatcagccatggcagaaggctttgatcagagggcgcaaaaccgacatccattgctgcctccgccgctaaatcaccctactacaggaccccatcttgactggagcctatgagaccgcttcacgcggcctgctttttgaagtacaaaatgtggtacgcgatatgagcctagcgcagtcgatccatccggtagggtccaaacgcgtccgaggtgtgtcttcttcaaagcaggccgacgattggtgggtccttacgcaacctgttccaggtcgcaatgcaaaatggccgaccgttggggtcgaagttggagtctctgagacatatcgaaagttgaaggcagatgcagaatggtgatggtggcttacaaactcgaagggcgatgtgaagcttgtaattatcgtatctatcaatcgacagaaacccaagatcaagaagtcatcgcgttattctcttaggactttcagaataggctttagtctgaattaacatgtagtttataataatcggtggttgaagtacagtcaacttcgtcttccttgtagacaagcagtaagttaaagtaatgcctcaggcgcgaacacctccccgaaattccctcacagaattcacatcctccaatacaccaagcaaaccacgtaagcacgtcccagcaatttctcctatgatcagattcgtctaacaaaagccaagaataatgtcatccctcaaagaccagcaaagataccgatccatggatcccaaaacccggcctccacgtccaattcaacaacccgctgcttcgcggctccctaagggggtggatgatatccggaagacaaaggagtacaagactgctgcacggaggtaagtgccatcatcttctgtcttcgactctgcttccgtgtttttgtttgcttggttggcaaatgatacatggcgacaatgagaaatctaatcgcctttctagatggacaacgactattgtcggactaccaattgtaatatatacatcatggattctttatgagcgacgtgagttctttgatacccagtaaaccttaacattctttttgattgtatatacactaacttatttcctttagtctatcttggcaagagtcctaagagtcgtgaagatcagaaacagaaggattaatcttctttttgttttaaattcttctgggagcaggaattctgtacgattcaaactagaatggcatttgagaggctttacaactgtacataagaagccctaaaacaatctgtcttctctcgtctctatctaaagcagtctcttaagggggaaacaaatccggtttaatgcattcattgtaaaatccaacgcccggagtctcaaaatatatccatggctatggataggcgagaacaacctacccagccgaaataacataaacagaagaaaggtacaacatccaaatgcataattcccaactttggaaattttgccctaaatcctccccacattgccagcctgctggggtgaaaagcaagaagaagagaagtatatataatccaaataaggtatctggaagagatggaagagatcatctaagaaacgaagtaacagaaggataaggtgggggaaagagatcgtatagatgtcacagccctgagctctaggaaccatcaactggcaacgccttggaaaggaatctgttgatcccccgagccagccgacggcggcatagatatcgagttaccgctagcgctggcgggcttcgaagtacgctcacgcatgcgacggccctccatgagaccacgcaagccgcgcttctggaggccgataacactgcttagatcaccggtccagagctcacgttgggggcggcgcagctcggcgtctgcgtcactgtggtgacgagtagagcgggactgcgaccggctttcatcgccactaacccattcggagtcggactggctgaaactagcgctagacgcggatgtcgccgtgcttggattgctaatagaatcctcgcggtcgcggcgggatctgcgttggcgcgaatgcagggagacactggtgtcaatgcggagagatggaatacctcgagcaaagctgctgagagcgcctatgctgctcgctactgatgcggaggcaccgccatgctctgtgtcggacgagcctgatgtgagtgcaccgtgttgggagttgctgtgttcgcccaatgttggcgcagtgccgttgtggccggtgtaggctccatttagagcctcgagtgtacctcctggtccaccattgaatccagtaccccgaccaccgccggcggccatggcagctgcgttgaatacagccgcggcgttgcgcccatcaagaatctgatggagtctttcgacggtggcctctaagagtccgtcaatttggtacggacgggcaagctgtagaagcgagcagagaatttgtggtgtgcaaagcgaggtgcctacggctgggagagctgaggtgtagaggtattgaaccagaacttgaagagtcaaaatggtatgggggagatacagcacacgcggtcgggaggtcggggcgaggctgtgagcagatggaacttcaaggttctcaagtaaagacttcgaaggtacagactgattgacaagagttgttgcatcggagcctatcgaaggggtgatagtgatgctcgagttgcggctcgggtgtgtcagggacggacgaagagatgcgatgtctgcaatacctccgtccgacgattcgcgaagaagttggataaagtacggaccccagcgcctagtcaatatgcgagagttgacggagatacattctccccctatagcctgcaattccatgtcggccatctctggcaaagattgcgcgagcttgcctagctcatcggatgccgcagacaatggccgcccacccgatgtcaactgcactagcttcttttgcaaggatgccggaacagaagaggagctgtaagacttatatcccgaggttggagaagtgcggcaagcattgttgtagaggccaaacgcctctagttcgaccagacagacgtgcgagaagttgattcgtcggtggttgtaatcatcgacaaggcttcgcttccggtgtccaagaatcacaaaggaattacggcgaggccaaagcactccccgattccaactaccctgcccaaacaccgatcctccagcatcaatacgaccccaagtcaatgtcttcaggtcgagagcccacagcgcatattcttgcttcgatgaagtcaggtatgttccactgacaacgaagtggccgttgataataccaccgtttgggaaacgcagtcccggcggggacgcttggctctgcatcggtcgttcgacaaggcgtccgtccggcaggcgcacctgtaactccagcttgacatcaaggaaattgtagttggagtatatcagcatagggcaacctggagattcagtgtcatcctgaatcggctcgtgttgatctcggtctggagctgaggatccaatttcggacacattcattcccactagtggagctacgacactgcgataagcgccgcagctccttcccaaggggctagtgttggtccacttgagactgcgtaggttgaaaacactgatttgttcgatgtagtgattggaactgtcctgtcctccgaccaccaccatctctgcacccccaaagccgtcaatatccacaccaagtgtaccttgatgagaggaggattcggggttattgtgaatggcggatagaggtgcactggcagatgtgaagcaagcgctcgacggcagtatcgtggcacagtgtgcgtagcgcccctgaggagattcatgggcagcaacacgagtccatgcccgcgttggtacatcaaagatgtgaatatctgacataaccacgacttccgattgtgactgcgattgcgattccgccgggttctcagggtcttttggcgtaggcgcaggtgacatgcctccataacaaaccaacttgttgtcccccaaagcacacacactgtggaagtatcgcggcggtggaacatctccagcgggctcaactttcgtccaatgtcgtcgaatcaagtccaactcataaaggttggaggtgagttggggacggctgcgtgagaggatccggcctccgaagacgtatagcttatcccccagtatggtcgtagtggcaccgacgagcggacggggttccttgccggtcgttcgccgcacgttgcacaccagaccagagaggttgataggaccagaagaaggatgctggttcagggacggagaggcccccggcgcagaatcctctcgtcctgtatcccccatgtaccccaaactcgactgacttcgcgacatcatggtgggcgggtttcctgtccgcttttcaacggagacaatcgtgtgggtagccgttgaccccctgtttcagttctcccaatatcgctcgcatgcgatgaggcgtttttctctcgaatgcgtctttctgggacaatgttcccggcgctgattgtaggtgtggtacggctcgaaatggtcgttgtggggagtcgaaaaagggggtggttccccgcgacgccgcaactttggctccaggctggcttcagaacgaggaaattgatgaataaaaactaggcagacagactaacgccgatcgtatcttagatgagcgcacagtcctggccgaagtgtcagccgtcgaggttggagatcggcacaaaaaatgtttaccgcttttgtgtctccccataactacccataactatagcaatccccccaaggaatgctcttaattcatgcatttactagggaataaatattttgtctgaatgaattttaattactttatgctttgtgatactttcccataggtccctttcgacaccgtttatcatgatcttgataccttttatcctcctgactccgggcatacgaagagagaacagaggtgaaggggaacaagaggtgacgaacttgcgaattcagacttgaacaccaaaaaggaagctgcacctgctcggaggaaaaggctggacgaagaagatgtactaactactactacattcacgccatgttgtgtaaaagcgctgatgtgcgcctctttgtatattggctttgtccttccaagtttaccctctcccctttctcataagtctatccattgccctcgcaattcaaccagatttgatggaatattgagaaacagttgagtactagttatagtgggttatagtgctccgaggcactcagaaacatcaatatcaacaataaagcccgatggaagtaaacctctggcgaacatgaggaatcgagggacgaatctattctcgcccaaggcttcgggcctcgaattgatttgatcgatctagaagacatagatgaaaacacagatgaagacttgggtgatgcttgtcaggtcatccgacactattccaggtatgatgatatcaaccagtttgtttcgaactgggcggcaggtggcttgataaacgttaatatctgtgattgaggaatgacaaggatgatcatatttatagcaaccactaagaaatgtccctggagaatatcgaaactataaaccaggcattgcatgctgttcaagcctgtgaactcttcacccagtcacttcattcgctccttgtcttactctgtgactgctagtggaaagtccatgtactctacggagtaccaaatatcacatgcccagccttaaataccatttacatattcaattaagcgagcatatgtcgttgtttgtctcatttgtgaatagtggcataaaccgaccgccctcaggatacctataagaaggtggccctgcccccagaacttcttcttcttttctttcttcttcagctctctttgcctctggcttagatcaagtgtnnnnnnnnnnnnnnnnnnnnnnnnnnnnnnnnnnnnnnnnnnnnnnnnnnnnnnnnnnnnnnnnnnnnnnnnnnnnnnnnnnnnnnnnnnnnnnnnnnnnnnnnnnnnnnnnnnnnnnnnnnnnnnnnnnnnnnnnnnnnnnnnnnnnnnnnnnnnnnnnnnnnnnnnnnnncatgattattctaatatttggacttcgcgacttggtctctgtgcttgcgcatgcctcgttgcactgtgtcattgggcttacactacccccgatcgacgcgaactccttttcatcaactgttcggcttgtccgggcgcttggagaagatgggatgtttagaatttacaacaacaatcattgttattgtagtggggatgacaccttctaccttctcttctagtagtcatcccatcgtgtgctcctctctagcaccctactactcccagagccgactttgctctcaccctgcttcgcaggcaggactgccggtacacctgccgcctcccttgcagggcccctcttcaatatctaataatccgttggatgcgactgaatctcaattaatttgatccaattaagcctttgacttacaaattgcttcaagcaaatatttacaaaatgcccaaacgtgtcactgagcactgccatatactacgctccatgatatagtactatccaaagaagtgaaagatagatctaggactactaggatagacagtctggaaatattgcaatacattgaaagagaaactatctgagaacctacgacttaaaaatctgagggcagggaaatgccacgtaatctctcagcaaattcttacaaaagcgcataattcaaaaggacggcgtaagtaggtttcattaatattgggaaactatgtcccaagatgaacccgcctcatatttctagcatcatatcataagacttcgtttactccttgagagtagtgaagcgaaggtaactataaggtattagtatcctcttttcggactgggagttggacaaggaaactcacggcttcacttcacggatctcgccgaacttcttcttggcatcctcggtgctaactgtaggtggcacaataacgtcatcgccagcctttgatcgagttagtaagatacttcgcaatagttccaggacctgggggacggggatcataccagccagttgatcggggtggtgacacctctcttatcagcggtctggagagagtcgacaacccggagaacctctgctgtgttacggccagtggaggcggggtaggccatgatcaggcggatcttcttggcggggtcgatgatgaacacggagcggatggtgaaggcaattcccttgctgtcgacgttggtcaagtcctgctcgtcaatcatctggtagaggaaggcgattttgcggtcggcatcggcgatgatagggaatttgagttgagtcgaggcgacttcgttgatgtccttgatccactcctcgtgggaatcaagcgcgttggcactctagagacagctgcgttagctaatgcttaagggttgtcaaccttggagcctcaccaatccaatcaacttgacaccacgctgggtgaactcgggctcgagcttggagaaggcgccgagctcagtggtgcagctattgattgtcagtacatgcttcacagaggtcaagagggctgggaactactgacactggtgtgaaatccgcagggtgagagaagagaatagtccacttgtcaccaatgaactcgtggaagtcgatctcgccctgggtggtgagagccttgaagttgggggcagtagagcccagacggaggctaacagacgatcagtattgtatgcatcttgaatatagaggtaggagcttacataggagcttcagccattgtgaatagatagatcggtcaaattgagttgtagatgaaagggagagaggaaagtaagatcgagttggcgagatacgaggttaataacatcccctccgggtttcccatagatacatggattgaccccaccttaacctcatctggctggttcctgtcccaccgcggcttcgttctggatggcgtgatcattgttccgcccggcagaacggccatgattggcgcatgcacggcagcacacagcgtgggctgtttagcgtgcgtgatgcaatatcaactgtggatgagcatttcgggttccttgggtttctttttacccctcaaccttacctaaccttatgttagaactacattacctacaatatacatacaacacactacatgcacggagtagctctactttgcaggtagggggcctgccaatatatcactactaccacgttattgtcttgctataccctttccttctagccattggcgcctaaatggaaaatggcaattttgactttcctataatcatcctatgggtggctcttattaggtacatatctacattggccattgtcataaccagagaagctcgatatagctgaacctgccagttttctggctgcgttgtaaccaactcgatcttatttcaagcaatcaaggaataggaatgaatcaatatgtgcaggctacctagcatggaacaattcctatctaatgtttctacatgaaaaacaacaaccttggaagtctgtactattgattgtgtaggccctaaactacattttaggaaccttgatagctagttatgtaccctctttcaagcttattcggccgacatgattttggtcaggaccaatagaaacccgaagtgatggcgcaatatcacctttacatgatgaatggtaccctgtcatcgaaaactcactatgaagtaaaatataccttgtacgtcaggacaagggaggcctaacacatgcaaatctgtatatcttctccacgccgattttaatccgacattctagacaattctgattcaataagtatttgacccacatacatatgtagtggggctaatcgaggcacatattataacatacatcatctgaaaatacgttcgtcttttgctgcctccaagtctaatattaccttcacactataacatcaccttgaagctatgatacagtacatttttccaaagtttgttttcattagaaaagagttggcttaaggtggcggaccaaacaatatatgtattcagctagtacgatcatctatatgaatagacttatagtgagcttaatggacactacatatatacaggttgaatctacacaataaatcttgatatctttatccacttctgtctcagtatgatcttagatgtttgattgacggcataaaataaatatagatttaaacttccggttgccattagagatactttcagagaggataagtattcggcgcgagttgcttactctagagtaggtagaatatatatcttcttcaaagcatttggaatagttctcaatatcaacatgtactgaccaaatctaaagtacactagtaatgcctcaaatgtcgatcagtcgcggtaactagcaattgaagggattctgagataatagtgatcgatgccttgataaccatcgaggttgtttacaaggagagctgtgtacttctaacggtttgtagtgccgatcatgatcgacccatcacgtgcgaccccagacccacatccgcgtcaagctcagtgccaaacattccaggaagctcctgcttaaactggatttgatagctttttcaacagttcgcgggatccttaccccattgattgtacagttctatttagttatactgcatttattgcacttactacgcttcctgcgtatattcgctgccttgcactgtcacttaatcagtgcaaaacaatcgaacagtcatgccacccaaacgcaagtctgaacgcgccgtgagcgcaaatgagtctgtttcaacgccttccaaacggcttcgaaataatgtagatgcaactccaacttctgcagctccagcttctgcagaatcggcttcggtggtaagcacattatgcaggggctgatcgtcgcgtcccatggcttctccactccaacggttgacatagcgctgacatgtgtggaataggttgatgttacaccccagactggagaaaagagaggccgtgggcgtccacgtaaaaaccccgagagctcggctcccaagcctgtttctgatgcccctaaacgtggccgtggtcgtccacggaagattatttctgagccagaacctgaggttgtagccccaacgggccccaagagaggccgtgggcgtccccgcaaggaatcaggtatatatatacgatatgtggtgggtgatatatgctgacctgggactgtgttatcaggcgatgcgacacccgtcacaccgaagatcaagaagaaggatggtcgtggaagaccccgcaagaaccctgtgccaaatgaagaagccgaaatcaccgagtcaaaggtcgcgcctgcggccaatgtcattcctgaaactggccgctctttctggctgatgaaggccgagcctgaatctcgcctagaaaagggcaaggacgtgaagttttctattgatgacctggctgctgcagaagcacccgagccttgggatggtacgtcgaacctgtctcgaattctgcatccaggcgatcgctaacagttgaacaggtgtgcgcaaccatgttggtaggttttcctgtctaaagtcacggtagctttgaccacaagaatgatactcacagtcgaatagccaaaagtctgatgcgcaatatgaagaagggagactttgccttcttctaccactcgaactgcaaagtccctggagttgtgggagtgatggagattgtccaggagtattccactgatggtttgttgccctcgaaattacactgcttgatcatattgctgatcaacaacccatgacagagtccgctttcgatcccaagcacccatactacgacccgaagtccaagcgagaagacccaaagtgggtcgtcgtccacgttgaatatcgccgcaaacttgggaagcaagtcaccctccaggatctgaagtctcatggtcaggccggaatgccgctcgagaatcttcaaatgattaagcaatcccggcttagtgtgtcttctgtgactccagcacaatggaaatacatactggagctggcaggcgaggaaccacaagaggagttcatcaggaaggagtgaaggaggaataggcatgagaaagcaagccgctacatgcaagcgatgcacagagagttttatctcgtataactctcccaagtattttctatcgacggcgttgtcggttgaacatgggttatctgcacaagcgaattgaagcgtattttatttgactcgatgtgtcctttataaatatgtgcaagggatagactcaccggaggagtccgcttctcttggatctattcgcaacagcagcaaggtcattgccatacaggctgatcgcattgctttgcagcttgaccattccccgatggccgacatcccagcagcccgatttggcacttgcgggatggtgtcatatcgctcttgtcactgatcgccctcacacatgtgtgccccaaattatccagtcgtccggaacaagctgggtcagaattgtctcaaacctttggaaacacccgtcggaccctggttaatgcatgcgtggtgacggatctagaaggcggtatcgggtatgtctataaaagtcaatattttccgccaccatatccgcactcagtcgatcaatatccttggcatccggcgcccagttcggagtcatggaacacggcctgagcatcccggagctatgacgctatgtatgtgcaggtctgcagctgtggggtactttaaacgttcgtgacaaaagaatagattggacctcccgaggtcgggctagtcatactttgtaagcagaaggggttggcccggggtctcatgaagaaacgaggggaatactcgccgaatgcgggctgccagccaatcagagagcgagattattgcaaatctaacaaaccaacggaggacggagactcggaagagtaagtctatccgggtggagcgtctttatcggcttatcaggcggggagctcttcgggcgacttggaactttttagccctaggggggtttcccctcctctattaaccccctctctccctctctccctctctcccctccatgtcccgtattcacctacgctttttgtacaaaggtccatcaactcttacttccttcatcgccccgcgtcgctcattccacagctcccccttcgtcatgtctgaactctcagtgtaccttactgccccaaatgggcgcaagtacaatcagcccatcggtctcttcatcaacaatgagtttgtggcttccaagtctggcgagaagcttgcttctgtgaacccttcgtatgtacccctctgaagtgtgttgtgtaactttgagtactgaccagatctccagcgatgaatctgagatcacgtcagtgtatgctggcggtgaggaggatgttgatatcgccgtccaggccgctcgcaaggccctcaaggacccctcctggaagctactgcccgccactgagcgtggtgtcttgatttccaggttggcggacttgattgagcagcacaaggagactctggccaccatcgagacttgggataatggtgagtaaagtgagcgattgactatcaagataagaactgacatctattataggcaagccgtatcaggtctctttgaatgacgatatcggtgaggtcaccaacactctccgctattatgctggctgggccgacaaggtgtatggtcagaccattggtactaccccggccaaattcgcctacaccctccgccagcctattggcgttattggccagatcatcccttggaactaccccctagcgatggcagcatggaagttgggccccgcgcttgcgtgcggtaacactatcgttctcaagcccgccgagcaaaccccgctcagcattttgtacttggccagtcttatcaaggaggcaggtttcccccccggtgttattaacgttgtcaacggccatggtcgtgttgctggtggtgcgttggtcacccaccccggtgttgataaggtcgccttcactggttccaccatcaccggccgtgagatcatgaagatggccgcaggcaccctgaagaacgttacccttgagactggcggcaagtcgccactggtcgtctttgaggatgcggacctcgagcaggccgccaagtgggcacacactggtatcatgtacaaccagggtcaggtctgcactgcgacatcacgaatccttgtgcacggatctgtatacaacaaattcgttgagcttttcaagcacaccgtccacaccaccagcaaggtcggcgaccccttccacgatgacaccttccagggccctcagatcaccaaggcccagtatgaccgggtccttgaatacatcgaggccggcaaggctgagggtgccacgctcgcttccggcggtgtggcgcacaagaacgtcggtgatggacgtggtttcttcgtcgagcctactatcttcaccaacgtcactgactcgatgcgcatctcccgcgaggaggtgttcggtcccttcgttactatcgctagcttcaccacggaggaagaggccgtcagccgtgctaacgacaccacatacggcctcggcgccgcagtctttactcgggacattgagcgcgcccaccgtgttgccgccgatatcgaggctggtatggtctggatcaacagcagcaacgacagtgatttccgcgtgccgttcggtggtgtcaagcagagtggtatcggtcgcgagctcggcgaggctggcttggacgcgtactcgcagatcaaggccgtgcatgtgaacatgggcaccaagttgtaagctgtttatatcaatgaggaatggatctcttccattgcacataagttgatttgtcataagttgatctgtatataatgaccgaaccttttgttctcatccctgcaaaacgcaaacactgtatatctatttgatcttgttcctatgtagccccacagatctcgacgggccaacgtcaatctcatgtatcgcctccacttctcgcttttgctcagatacccgcaaaaaggggaaaaaggaaaaaaagcaagatcgaactactgagtgcacagcccaggtaaagttacttctcgtcatgcagatcaggccctgcaccgtgcagtgacatgacggcaagtggttgtcccgtgcgcaatcaggagaaaaaggaaggggaaacctcaactctcacaggctctatgtatgtccatcaccttcgcgttagacaactggacttgcacaattgatgcccaacttcttccgcccgtagctgcgatgatgcaagccttatctgcatgcaagccttacctggaccatatggggcatggtgcatttgaggattgtactgagccgttgaagctgattggtcgaacgatgcttactttgtataggttcacctcggttattgaccccgtactagtaactagcgaactaactagttaactataccatctctccctcgatctgattatcagttcatattgaaaaaggtggatccaacacaacccaattcccacctctccatctatccctgcatgacccatcacgccctaaaatcaaggtgatacaagccggctgcaggcacattctcgcagacatgcatggcacggatggaaattgcaaggcgggaatgtttttttttttttttgcaacgcggtatttgggcgcaaatctcgagtcaggcaggaaaagggccagattactcttcgaactctgggattggtagtcaagagtaagtgcaggttccaggtccaggtcttagcgcccaccagcacacacatgcatgaatctcttgcatctgcatgcagagtcggtcatgtgaaaagccacctggcgccggtctggaaggtgatctgacggtactttttgacgggtacttgctatcatgattgagttctcgagccccgaactctatgtatggcttggcggctagctgcacgaattgatgcagaagagaaagtttacgcatagtatccgtagttcatgggtatttcagagttcagagctctggtgtgatgattcgcattgcagacacgggattcctgcaggagattcaatagcgcgtgggattggagagtttgggattcaattcaattgccgaacggacttggatccctgcagctgtcctacaagttcgctcgaaaggaaaaagaaaagcaggatagcatcttccagatccaagaggcacggagtacggtgtaccagtgacaacatgtagtaaaagtgggatagtaagccctcgtgggggtggcttggcatatcccacttctcatcctccatctccttgataatattccctcttcgatatatctctgtgaacagtataatcgtaagtacggtgacaacctagattccactcgaatcacgcttgcacacgaataacccgtttaatgagcctgacatctctcagttcccaaatagcggtgtccactccatcaccgatcggcatgtctgaaattcagaggtggacggtcaacgaagtcagtattccatgcggttcgccatttgattcgctctttttgattatttcttttttctcgctctcctctggttctcgtgtcggtcagacgtgacgattatcctcccgagcgtatcacagaacaggaaaaaagaaaaaagaaaaagaaatctacgccaatcacagacaactaactcgactagccgtatctcgacatcccaggaacgctgctcgaagggccctttcacgatgtggccaaaaacgagttccggtttgtggatatctgggatcacaaactatatcgcctcgatctgacaaagggccctgactccttgacggccattgatactgacgccgctgttgggtgggttcccaaccgttctggaaatcaactaaaaattcacttttgctgacggggaaaaccacgtgggacttttagcgtcaccgccaatattgccaactcatccaatcagctgattgtgggagccaaacatggattcgcccggctggaccagactaccgggaacctctcctatatccacggtattcgtgaactttggggcgaagatgaggggaaagcagagaggtaagggtttgaaaaagaaaaaaaagaaaagaatccacagctacatcgaagaacgtcgactaacattaaccccaattgttacaaaatataggatgcgtttcaatgatggtgccgtggacagccacggccggttctgggccggggccatgaacgacccaaagatcaagaagccggaagcagaaggggtcctattcagactggatccagatcagagtgtgcaccacatgctggcaccggtgacgatccccaacgggatcgggtggaatctagccgacgacgtgatgtacctgacggattcaccgacaggcaagatctttgcctttgactttgacgcttccaccggcgcgatcagcaaccgccgagtgcacttcgatatcggcaatgcgctagagccggatggctttgccattgatgtcgagggctgcatctggagcgctgtctacggcggcggaaaggtcctgcgaatttccccggccggaaaggttatcggtcagatcgatctgccgacgcgcaacgtgacctgtccagcctttgtcggcacagagctgtttatcactactgccaaggatgatcgtgatgatgaccggctgccgcagtcggttaggtacggcggccgggttttcagggttgatgtcggggtccgcggcgtgcctaagaatgagtttcggttccaggactagggtgtatcgtgtgcatcagacatccttggatacgtagctgcatagtacatggtactccgtacttcgtacatacatagcacatacatactgccgggatggtacatgcttagttcgatttggtatattcttattctactccatacctcggcatccaatgcgacgtgtatccgtgcaacgtagagcagaaggatcaattgcgcatcactagtactttgcacgtccccaaaaaattagatccaaaaggcggtattggtagctaacccaaagaaaaaaaaaaaaacacagacgacaattcttatgcagcgtgaagctgggtggatcgaggatcagcaaacgggcgagcacgtcggtccgcgctgtcattgtccggaaacctgggtctgggtagtcttccactgcaggccacgcaagggacacaaacccaggtttatagatcgaatcggcgttcgcatttccatctcacatcctgtcgaccatatactccatacgtacatgcaattgttaatataggacttggccttgattcccctggtttccgttcggtttcgaactcggctagatttcggtcgaggctaggtagcgcgtgggcaccagcactgccacctcttttttttttctctggcggggcccgccctgcagggcggaggcacgaagtgataggtggtgtatcgcaatgtgctgtgctttttttccgctgttttcggactatgtgggtgggttgatccgaagggggaacatctaccgtacctgtcagcgggagatatgccaatctagatccgacaaagctattcttctgctttttcagggaaaatgcggttgcagcggacacgagataatcggagatccgtgcggtgaggccgaagcagatcataaaaaggggggacagcgttatccacttccgaagtgcagagtcaacacctgaatttcggaaaagaaaaaggaaaagaaaaagaaaaagaatcgggttctcgatgaatccagtctaatggattccggatctttttaacttctccggctctgcacaattcaaatagttcgatgtcacgcatcccgaaggcatgtcggggataaccagactcaatggtctggggacggcggtttgagattgtcagccacaagttgacagagagcacagccctactccatacggagtaaggagcagaacgaagagaaacgtggaattcgcttccaaattctctggggaacatctaagccctgttcgatccaaccagtcagaaccactggatctatcagaccgcaattgtctgtcgaatatgcatgattcgcccgaaaaaaagaaaagaaagaaaaagcaaaggaacaatagcggggactctgctgcagcaaaagactgacagctcctctaaccctgtcggaagcgacctcggcacttggacattgccaacacatcgaaagaaaatatatcatacgttgtccgtacagctttacccacttgtaggagtcggaagatggaaccccatattggaatgcgtggagatcatggcgtcttctcggacaatgcttcaatatctcggcaagatcaagccaaaacgcaagtgccaagaagaggcgcttcagctgtggcagcgccagctcgcctatctcataaaatcatgaaagcaatttattttccattcgaagaatccactttggtgcagtgcgtccagactacggagtacgaagtcgacactaaagcgatctccactgcttatttgagggtcgccacgcggagtctttatcccgtgacctcggacaagctcgacagcctccgggaatagagctatccacacgggtttctcatgcagctcatgcggctagtggaatcctggccggatccctttccgcttggtccgatcgtggagcgtcaaatcggttgtgatagagaagaggtgtgtcccctggttgctgtttacctttctgtttatttactttcgggttccaaattacatcatttttcagcggactatcaatgtcacaccaaggggtgaaacgaagtgggttttaagttgtctcgtctggtgtctgttctctgcgttaccctgttccatgacgtcaagtagataccaagttatagattgtacaaaccttgacctcgaaacttcaaaggcacggaactctgccagataccaacggtcaacggcaacggccctttaaccgggacacggggaggatttggtgatgcacaacatgcatgtattataaactttgcgagaacatcctttcttcctttctgcctgtgtactttttttatatcccaccctttctatctagattaatagtatctcgggaatttagtctctccaagcaccaaactctcggaaattgacaggacggcttactaggcttaccaggcaactattggggattgcctgactaactatacccgagtgggtatagatcggacaggtggaaaatggagtagttcggcgtttctcttttacttatattgccatgcgtcatccgttgactcccagagaagagaaaaggaaccttctaggtcccccatacattgccatccatggatactatcctccactaacgcccttctacccgtggacgcttcaaacctaccacacttgactccctgaaaatcccaaaggaattaatgaataaatcgaaagaggcaaaaaccaaaattaaaaaaaacaaataaaaaaaaaaggtctccacctgtccctgtccatgtccatggtgacggcgcacacttgcagctcccgatgattcgtgctgtgcatgacgatcgctttccccgggtgcttaggtcctttcctagatgtgactaggggaggatgactctatagctggatccggtaatggcctataatagggggtgatatcggtcactctgacagattgacagattggacgtattctatatctacttcaatattgattttgatttgatttgttttgattttcctttctttttctattttagcatggcaattattattaaaaaccaaaaccaaaaataaaaaggcccaaaaacaaaaataacaaaaataataaaataagcccaatactccgggggttggaggtctccataggagatgcccaactatccgccagactgggtcggacaagagacaactaagttgtcttggagccatccagaccaggtgatggatcattctctcaccgctgcgaattccaacggttgttcttaagcttgccccattttccaatttcctcactttccctgactttgtcgcttttgtcactttgcctagcttttattaagggcctcggatcttttccccatctttctagcttccttagcttccttgtattgattatctctcctcgatcctcaattgagtgaatcgagtctcttgttctatatatccctctcactgtcttcatcgtggcggccttaggaatcagtgtgttgactgcaccgtattcgggctcacattccctcaacctgtcactctattcagatcgatatccatcgccgtcaccctccctctctcatactcctcgagaacccagcgacgaggagagaggggggttccggtcatgccctaactcccgccccgtcgtgggagatttgctttctatgtcgcaggattctcgacgtgctggttcattgtccagagatgtgacgcaaactgatgaccgtggaagtgacaatgatcgtaccttcaaccgcaatcctacccgccggccacctcaacgacctcggccccagtcatggcatccatacggacccgtggagccaccactggaatccatgtcgtcccgacccattggcgttcatgccatcttgaatcatccacaagcaacaactgacctggccggccgtgagccactgagcctaccgggtccatcatcctcacctcgtccccaagggacctcgcccataatccgttcaggatatgcattgacgtcgcagccgctatctccttactcacggcctctgatgaatccagcatcgccttcggcgcggtttgtcggcgggggcggcagggcttctggtcagtctagtgtcgcccagtcaccactacttcctcatgaacctttgatgggcccacgcctacccgtcactagttcgcctttgcccatggagacgggcctacgctcaatagcacctctcactagcactcagcctccctcgctgcattctaccagtatgcattccaggcgaattagtgccggcccggggcctctcagcaacctgaaatcccaagaaacgagtcctatcacgtctcattcaactttcaatcactttggccatgcatccccagcagtgaccagtgtctccctcgcacaaagcaccgcatcatatcctactgcgcctcaatatatgacattggaccctgtggttcgaaccgtctccgcaacaaaaggccccagacgccaacctgagcaacaccccacccgagccggaacaccacaggatagttcccttccactgggcatgataccatgcgtactagacatgcgatccggctcctccagccaagccgaaaagcgcaaagctaacagcgacgcatcacgacggttccgcaatcgcaagcgcaacgaaatgcaactggagcagcggctcaccgcacagcaggacgagatccagcgcaatgtagaaaccgtccgtcgccagagcgaagagatccgcttcctcgtccagcaacgagaccactaccgctccgaacgagacttctaccgcgaccaactcggccgcacaatgtctctgagcgccttaccccccaggccctcctctccacgctccgcccaaccaaccctcctccctgcatcagaaccgggcaccacgacatcgtggtcgggcgtcgatgctgcccgatccgcttcaggcacacagccgacttccaatccgccccagggaaggatgctcgaatcagttcagtctcaacctacttggcctgcaagtcctccctattcttcaacccccattgcatccgccggacgggcggttgctggcccgcattcccggtcgccgtcgctatctgggggccaactgcctccgctgcagggatcgtggtcacgtccttgatttgagtttgccggctgccgaatcaagcgacaattattatttctttcattcttgtcttttttccccttttccttacactcttaatcatcctctctcttgtgtatgccactgctaccaggagagacaaacaagcggtcactggcatggccgctcgcaggtggtctacactcctttagtgaggtggtctactcaaaagtgcctcttcctttaggctgggtgtgtataactatctgcatttcttcctgtcctcatcaaaagactcgtctggttctgcaaaagtgcaatttatacttctctgtattcgctgtcattatattaccctgtcttacttcctcatcctgtccctctgctttgattattctcgctctctctttgtgtatggattgcacagcggtgatacctccatcggcgatgtattaaatcatcatttttgattgaagttggaagatatttgaaaactggaaagcccaatatgacagtttttaccacttaattgttgaaatccgacctaaacctcgtaataccaccatctgaggactcaatcgccgaagctgtctagacgtatctaggaaacgcttggatcgaggtcttaaaaagcttagcttgccatgtaactttgagacatacaatactaggaagtgattggtctatgggtaacacaggctaaggtagcacaaggtggttcatacgacatcataaacacatttagaatctatcaggcaggccgtagataatatatacaggtgctactctagttctaaatatctctatggtcttgatctagttatgaaattattcatgattaataataatggagtacaacttagtaattatctgattggtccgtgaagttccggtggaagcccttcttccaccggaagttcctccactcaccgaaatctccaagcagttaagattccagacgacactcagcacagccaattatcgccaagaaaacttctcggatcctcgaaatgcggggccccgagtttccccacggatgacgggtctttctcgtattcctctcatattaaggcaatcctcacagtaactacaacatacaaagtcgggctaagaagaaaacaacatcatcataagagtggattgcagtccaaactccagtgcgaaaccgttcacgtgttgtcgcagtcgagttcttttaacactgtccccaatcaaggtaaatttttccgagttccgagagaggagctactctagaggttccctagcgctaatccctttagcagcaaacggaggaagcgaccggggtccgttccgatggatctgccatcctctcttactcttctggaggccttctccaatgccgaggatgtagaccggttgaacgggagccaggttgatctaggtaggaacacttccgtcaagcatatccccaatccccgcatcgtcgctgacgtctctagatgccttcggacagttcatcgcatcggggaggaagccgatatctcaaccacatatgaccttgacgaaccacgtgccccagacatatcccttagacagttatcttacgacgatcaatgagctgctctcgccgccgaccccggatctgattctaggggagtacaatcagccctttgaactgcagcgaaccttcgaaactcggcttccgaatctctctgaagaaagtaaaagttatctacacttgaaaggagctctcaggatagttcccgtcgacctccggaatgagttgctgggggcttatatcaaatatgtccatcctctcctgcctgtcattgatctgcaatggtttttatcaagtgtcatggtcgaggatgaatcccgatttccgagcccgcttcttcatcaagctgtcatgttggctggcagtgcatttattgagcaggaagctgccgtcaaagccgggttctcgtcacggaaagcactgcgaaggacattattcgggcgagccaaggtgagattgagaaagacagaatccatgacaagtcaggactaatctcgactctatcatcagcttctttatgaattcgagaccgaaccagacgcatacacccagatccaagcattattgcttatgatgcagtggcatggaagtggagttggccacaaaatcccaacatactggtttgatctcgcgtattccacagcagagcgcgtcggtctccttgggagtctagaaacaggtagtttttctcacaagcacagactatggtggtgtctctatgtgcgcgaccgcattctctccctcggtttccgtcgaccactacgaatcccaaacagcgatgtcacaatgtccctactggaatctacgagatactattcctccgagccctaccacgacctcgtcctagttatgctgggagaagcagccgccatgctcaactgggaaaaccaagagcggatgatgcttctattcatccaggagattaagcttgctcattgcgtgggcgtcattatcaatcttctgtatcaagatgcttggtcgccgtcgccgtcgggggactataaatacgccatggtacccaagtcgaatgtgccacaggctgctataactgaatgcgaacagcttctgaagacctggattgaggaccttcctgccccggcccattatttctccccgtcacttctgcacggttgccataccgagtctccggagattgtcctcctcgttcaccaagcgttcctctatctcctccatctcactacaatgtcagtactctaccaagatgcgtcgagccgaggagatggtcttcagacgacccttatatcggaaatgagaggcctgacttcgcaagtcaacgagattctcaatgagctacatgactgcaggatacttcattttctccctggaagcactattactatactgattattattctggaggcaagccttcctgacctgaaggtttcggatgatattgtgaggatgcaggccatgtcgaacttgtatgcctgcgaggaagcggctgggtatttactacaaacatatcctgcggctgagattgttctgtcacgggcgcagaatgctcgtgggcatctcttgggtttgaccgcaacttgattgcggagcgaagcgaagcaattacacgatttaaaaagcatttagtcattttagcgtacacagaatgaaaccaaccaagatactattatttccagggcgcgatatccgtacctcctgtctgagatttcagtaccgccccttcctaattaggtgcaaccaagaatactgccatatattctgcctaattcttgtctacatggtgaaagaacatgcattattcctatatgattcaaccccctgatgataaagcagttgatgaagcagttgtacctataggatacgatatgacaggagtgacctacttctattaggagtttacatacaaattgtaggtacctgctgtcttactacttttaacacaagagcggtgtaaagtcagaaggcggtgtacatgatctatacccaattaggaaggtacgcctaaattctcaggcagggggtacgaatgttagttatccaaaggggggtatcccgaaattgcggggaccccggttgtgaccccggtgacacccgttttgaattggctaaagcaccatctcgctatattcatggagcaaaagactagtgtggtgccaaagccaccccgtacatcgcgagaatgtgatagatgtctcagccagaaactcaaggtagatcccttcataacactcctggtttgaaactatggttctgacagtgttcgcatagtgtgacggcgcacatccatgtgtgctttgcactcgcgccggggataaatgcgagacatcccagcgcagagtgagacggacccgcggacaaaatccaaggggcagacgtcgacatatgaattctggagtacacagagcaatcgcaccagcgccacccaaagattctaactcgatccatggtgctggagtagctgaaatagcttctgccccagagagctcaacctcctgtccggaacgcctttcgaaagagctgcctcctggtgctaatgcctcctatccggaacgctctccggaagagctgcagtctggtgctaatggtttcgcgattgacttcgccagacaagtctttaacgaggaagaggctggccggactctgaccggtgcatcgatccctatccctgatgatacggaagctcctacgttggacaactcattatggcatcatccgacagaggtagagcttcccccggaggccgtgatattagccttggttgacgtctatttcgaccgtatgcaatggtttatcttgctgcttcacgagccctcgttccggcagactgcacgcaggataacttcccagactgtttggagacgccaagatctcagtactaccatgcttgtcctggcagtggctatgattgggctgcattcggtcttaccagatgatagatggcctgggcacgaattgttgcgagaatactccgttgatggggagaagttgatgcactatttgaacaatgagatacaacggaatctacttgatatctcaatcgattgtcgaatcgaagctgtccaggtttgcctcctggtttcctcctattatatttaccatagatcgccgagtcttgcttggactgtctctggtatgggtgtgaggtctgccaatgcccttcatctttatacaaaatcagtccaatatgaaagtccagttgtggatgaaattcgctctcgttgttggaatcatgctatttccagcgacacgtttgcgtctgtcgtctatgggcgaccttgctctatcgacactgagcttgtcgctttgcattcgcctagagaaatggacgacctagccattgatccacttctgctggaaaacgaatggatatttggcgatgggatgccaaaaacgacagctggatttttcgctatgaaatatgagatctacaacatcattcgagacatactttcacggtttcgtcgtcttcaattgagaaaagagacaatagaagaggaccttctggcaattgtggaagctgcacaagactcagaggaacaattagtttcctggcggaaaagggttcctcggctattcgattttgagttttggagctgtgacaatcgcctagagcagttccaacggcaaatcgaaatgttaccgcaacgcactaaatatcaagcagaaacaatcatcttacaggcggcaatactccaactaacatacgatggggctctgatacaagcccatcgacctttacttgagcagaaaatcactagttcttgctcgcgcttggtggtagacgcaatccacgagtcgttccgggtggccactgcagctgcgctacgaatatctcacattccggtcctccgtttcaagcatcatttcgccgaatccttcgcctccctacagcaatttactgcaggagtgatcctttgcatcctgccaacctgtcaaccttttacttcagctgcacacgaggccaaggctggaatcatacgtattatccatgccagctcagctttcgggccccgcaatcgcattgccaagcagaccgtacagcttctgacagagttgctgaaagtaactgtcgatcgagagatgtccagcgccttgagacgcggggtggaaacaattattcccaggcgtatatctgagaggggttccattctgaatgcgcagccgcgtatagaccatacaaggagtgattcactatcctcgcgagatacctccctcgatcagtcttcaacgtcaacaagtcacgcactgccccaggcaatacacgaccatagtagggtaaacgaccgaatagcccaagcacccgtcaaaccgcctgaatacccgtctgccaatatcttcgaacaacttgacgatacattcgctgcctttggtgagcgtgagtggagccgaggtgcgatcagtgagcatggcttctaactaacgcgttaataggcatgttcaacttgatatctgatgatcaaagtagtgcttggaattggggccgtacggtcccataacagaggatcaaaattgtataaacaggcggagttgatataacagctggtctacagaattgacggttgtgagggctagcagggctaggatgggcctgagcaagtggtttaaaagggccatgaatagagggagaaggatgtgaaaacaagccaggagaaaaggctttcttggtccatattgtttgttttggctttggaggattagagagacttggctgttacaatactgaggaagtacggtccttggaattggggagaataacgaatggttgctatagatatcttgaaggggagttttatgctaaatacagtctctagaagctcttttatcgccaaatcaaagagaagctacactatcaaatagtctgaggagcgctaagcacatggcgtgatagtctgtttggtaactataactgtccaatgtcactgaagaaatagaactgaattttatacatccctcttttctcctagacgtaagttgaagtaaagtggcagggtgcatacttacactacgaagagagcccaaaatggttgtattaaacatcatgtagtgtaacaaatgtatttcaaacttaccttctataactaatcttggaactatatactttttctttgttgtgacgttgcttgtcttctacatatcacatcttttaagtgcagtcggttttccacattaggctgtttgctatatgtgtggtactataagacgaggccactcctattgctcaggcaatgtttgccagacctctctttgcccctattctacctgattccgtgtctccataaaattaccttagaaacttcttggcaatgagagatctacaaatctaccatgtctatcggtcagactacctcctttctaggcagactgttctagatacttacgagtctatgcgagtgaaactcaacctatgcttaggatccacttgtggacaagtagactacaaagaggaagaaacataagggcatgaacttcacattacgcaaccatagctgagaaagatgcgagaaaaaatagcacacaagaaaaacatggtatgagatacggaaactcagccggaagacaaaatccagaaaacccatatcaagatatcaataaactaagcctcatgagaataacaaaatgctatttcaacgcttgtagtagaaagaaagaaaatgccatcggcacgcaattccattctaggaatgcgcttagagggcgaaagcagcgatgacaccggccatgacggcaccgaagctgatggcgttgcggccagcgctgttgaagacgggggtggccgaaggagaagcggtggggacagcgctggtggtgagacggatggaggtcaagggggtgctggtggggggcttgacgggagaaacaccagtgggggtgaccttgggggcgggggtagtggcgaaagtagtagcaacagtggtggcggcggtggtggcagcggcagtagtctcagtctcggggcagatagtggtggtgatctcggtgctctcgataacggtggacgcagcaaccggggtggaggcggaagcggtggtctcagtggtggagctagcgacggcgctggagctggagacaacagcggcggagataccgaactgggtggagtactggtactggccggtaccctcaacaacgagaagcagaccgtagtgggtgacgtcggcctccaagtcagcgctaggagtccagctgaactcgccgctgttggggatggactcggcaagagtctcgagggggaggacgttggtggagggaccgcgcagaagaatgagggagatagggccaacagtggtgggagtccacttgatggtgtaggccttgccctcgggcacgatctcattcagaccagggtaggtgatggcattgccgctgggctgctggttgtaatcaggagcagtgtaggcagcagccagagccacgaaggcagagaaagcggtggcgatagtgaaacgcatgatgtagtgtcgagattgacaaagagtgactggggtgagggtaaaagaatgactatcgttgaagaacgaaaaaaatgattgtgagtggaatggagagaagaggaagaaagaaagcgagaaggaggggagatgaactactttgtacatttctagtttggaggtgcatgcaaaagtggggccgacattaaaagcccccaaaaccaaaagatcgcgcagaccaaccatatcgcatctcatttcggctacattttactttgtgtggctggacttgtattgtaaatacctatcacactgacgctataccgtcatcctgttgtatcatctgcggtctcgtgcccaattatgcagcatcttgtcctcgtggggcatgcgggccggctgtggctcagatgttattagaacaattatgtataatatcatgctgtacgtgacgggtcaagtaccatcagaaccaggtaccgtttctaattggtgggtcccccggaagttaattttatccctaataacggccgacccttaatgtagagaatgttccggtagggaagattaaaaataccactagactgggtctaaggaagaagtattaaaaagcattggaaagtattcacaagcatccacaagtattaatgaaataggaatgagggcatatgagacaaagacagggtaaggggagtctctgttgacatatttgtttacctttttaaggcttacaaggttccaaggttctgccaataccaacccgtggaacccttggcgaccaaaaccttcgaagatgacccgacgataacccacggtagccatagcccttccgaacatcttatatatatgtagctattgtagacatgtttgtactataagcaatcaaatgcatatacttctcaaattgcaaggcatttatgatcctcatttccaccgtgtttaggaaaagaggaatcgctaaatcttcggagattgcaagcttacgagattgcgccctcaagcctgggcccaatgacaggcgtcgtacgggtattgtaccatacagccgcacagggcgctgtgccttgcaggtaccatgtgtcctttctacgggggaaacaagatttcaaactgaacctgcagggtaagattctgatattcactgatgttcactgatattcacgattatcacgtcaatcgcaacataactccacaccgataggcccgtgccatatcaaaaactacatacaatcgccgatcacaccagttcattattagggttgtgatgtctatgggaaggatcaacttgatattcaggggtcgaagttgaccagcttgtatagagtgatacatagtatcctatgttgtttacatattgtaatccttcatttcctactaagacatgtaagaatgaaaaatcaaaatacgaataaagaatggatttgtctcacctggcaattcgcggtgatttgctacgttcctgtgcctgaatttagggtgggacttgtgccaagcatcttcgccgcaactatcgaggtttgaatgtttcttaaccgggtctcaggctggaatcccaccacattaggtctattcataggctcagcccttcgcttaatacgagacgggaatttttagctttcgtctgagggggaaatgtgaatcacatgacgttcagcctcatggcaaaagtgggagccaaaaataaaaaacgaagagaaaaaaaaaaccaaaataccaaaacatctcatagactagtcatatactacttcgtatgctgcacgcccgatgcaacatgaatcacacatcgagccattcaaccccgggtacccggaccccttctgtacaactagcacctcgaggcgacgtgaagtgcttgtcattggctgcattgacaaggttcggatccaagccaactaaaccccaacttggctccaaacaagccccgaccaagccctgtcagaacaatcagggaaaccttcgcccgtggcggcccaatctcaccggggaccaagcggacctaaaatggggccgaatcgaacaggtctgctatgcacctatgagtctacctctactcttcccaagtgacagtcttagtctggaggaattcgtcgaatccagcaattcctccgaagcgaccaaagccgctgctcttccatcctccgtggggaaggacagcctcgtcgtggacagtcatagaattgatatgaacggctctaaaaaaaagacccaaagttagcctcaattcaatctccacccggggatgtgatctgtattcggaactcaaaaacccacccagagtcaatttgcttagccacccgtaatccgcggaacaggttgttggtgtacagagccgcagtcagaccgtattcggtgtcattggccagtgcaatcgcttcgtcctcggtgtccaccaccatgaacgacacggtcggaccgaacgactcggtcgcgtacaagtccatctccttggtgacaccgtcgacgacgatcggccgcatacctgcgttggtggattcgcttgtattaaggtcgccatacagcagcttagctccctgagacacggcgtccgccacaagcttcttgttcttggcgacggccgcggcgttgacgagaactagcgcgggcgcgtccttgccgaacaacttctcagtcgtctcggtaagtttctgtcggaacgcatctgcgatcgagcgctgcacgacaatccgctcggtcgccatgcagacctgaccgccctgtgtattgtgtcagtgtgatatcattgtctcgaatgaacattacgtacgtgcatgaaggatccaatggcacagttcatggcagccctatccaagttcgcatcgtccaaaacaatcgcggacgccttaccgccgagctcgagaagcacaggcttaatgtgtttgcccgcgagagaagcgataatcgagccgactcctgtgctaccggtgaagttcaccttgcgcacagcctggtgggcgatgagcgcgttggtgacggccggggcgtcggagggctggtgaaagatgacattcagacatccggcgggaagaccggcctggcggaagatgtcgcccagaacccagaaacacttgggtgagagctccgagcccttgagaacgacggtgtttccagccgcaagagggagtgcaatggcgcgcatacccaggatgtaaggaccattcctacatcaattaagttgagttggggccagctgataaagcgcagtataccagagatcggaagcttaccatggcgcaattgacagaatcactccgtacggctccttgtatacgatgactcccatgtccttcccggcgacattcggtacgataccctcgatcgtggatatccggcccgcgaaatccttgatgaagttcaaacccatattgaaagtgatctctatgaaaggccggccggcaccggtctcctcgcgctggtactggatcagttcctctttgcgtgagaccatgatgtcagcggctttcaacaggatgtcgcggcgctcggctggcttggtctttctccacgagagaaaggcggcttgggcactgtcgactgcgcggttggcattgtcgaccgacacgccgtagcaatagccactcagctcgccggtagccggggcatgaacctcgaatttgatatcggtctcaatggactcattattgatgataagcggggtcaccgccttattagattgcgccattgtacgttgaggagttgaagaaggatattacgaaggataatagggggggatatctctttaatacagaaagggagtgtcttttcgaatagaggggctgagctgactttccagcagctctgatcttaaccaaatagagtggcgggggttggtggggacacgaaggaggtaagactctgataggtcacggtttcattgaacgtagatcgattatgtcggtctgggctcacagtcagcagtaagcttattcaacggtttaagaagttatctccggtgatgtcaaccccaaagcctataataacatgccgatctcggagttaccggggggggggggaagaaaagatgacaaagcagagatgcagtgagatggagatgagatgaacgacatgacatggctttttgaattattcagcgtctatgatcaaaaggtatatccaaaaacacattcttcccgagtccagccctatcaccatgatcccatatccccatgcgcctgaaagatgcgaattgtgacctgcacaaataatacaagccgtgccctcaattggcccaaatcttcgtctcggtcgaattgctgcccttggccatctctgcgaagggacacgccgatcccttcggcgcagtggacgcgctttgtatggacggcgccacactgtgtatggaaggcgccacaccatctatagagggcgctataccgctagaaatactggaccggtcatcctcggtcgagctaccggagctgctgccgagaatgcgcttttcgccgagatatccctcctgatcctcggtatagttgaacatggacatctcgtcggcgaactcttcaccgtcgctagagtgataccgggcgaagagatcgttctggatccagaggatcttgttgacggcgcgcacgagcgcgatcttgcgtcgcagcgacaggtgtgggtgggatagcatggcttcgatccagatatcttggatgtagcccaggcatacgccgaggtgaatgtactcgatgttgagaggtgttctgcgtacttgtccgctgtgcatcatgctgtgttacacatcaggttagcgttgcacgataatctcaccccggggacggggatctgggaacggatagggctgaacttacccaactttgttcaagtaccgccagaattccattgttgtcgggtcctggcatagacgcgtcaggtaccagcgcaggaacagcttgcggcgctgaattttcggtgtgtcttcctggaggtagccctcctcgggttcggtctcgtcgactgttgtccgtgtgtggaaggcgcgggatgtgatgtcatattggagaatcttcttatataccaggttgacgactgccgggatcaattgtttgatgtatttgttgccagagagcagtgcttcgatatcgcctgaagggaatgacgttagtggctgactcaagggtggtccatggtaaaagcttactagagttgaagtcgaggaagctatggaggtacttgattcgctcttccaagcttgtatagagcagtttccggtcgacatgcattggcgcaccagccgatcctgatcctgatctgaaatccatggcttctgacactttattatgttgcgaacagctggggtcttccttgtcggggtggggaaaacggttggaaaggtagatcgagagtatgaaggagaagataaaactggagcacctcgtggcaagctggcggatcgagtatttataccatcgatgcgcgatctccgttcaagattactccgttcaccgttctcctatattggatgcaacacgattaaattgaaagccactaaactataaaacacatcctgttgggctccgctccaaggaatcctggaaggggacgatccatgactcttacccagaaaagcgacattacccgatctcaggcgagctttttccctaaaaacttcgattgaagacccaagtaaagtgctgatcgaatcagaccatagggcgagatgacttagtgactctctaaagtggagtaatcatctatttgtaggaatgtgtgggctgattcctgcaatctccgaactagacgaaaaagcgaaaaaagcgaaaaagcgaaaaaagcaaaactgcacagccaagaacggcaagatccatgggtgccgtgctatcagactcggcaacctgaaacaagcgactaggaatgtcgagaatactgtaggctcaactctaaccagccggtgaggaagctgtcagatgctagtataccagatggcgtttttagcatgccggggatataaaacactaaagtcacccatgttcaactgtcgcgaaccattgcccgtgcaaagcgaattaatgcgattaaatggatgaatcggcatttgaatctgactcttgttcactggctccggaactccgctacgggctaaacggtttctcttaggacccgtgatgaagtgggttccgttcgggtccgacggggttgcggacctggtgatgctattcgtgttgtctcagactgttgggtacatataaatacgtggtagacatgcatcgatcgtccgttgattgccttggaaatcgagcgttgcatcaactgcagtccccagattgtaactatcacaatacaattggctcggcacttcacagcgccccttaataagtgtaagctgtatgctagttagagattgccgaaccagtggatgtgtgggcccgaaggattgcgacctcaacgagtacaaagtacagactgtaataggggggaatcgggactaacaaagcaatagcgtcgaaaaaaaaaatcaggaaacgcctgcatgtcaaccgacgtggaccctctacccgtaatgaaatctactttgtacacgcgaactcgcgtcgtgtgatgacatggcctgatgggattctccgtagatcgggaaaggatagatcggatgtggatatggcatgatcaatagtccggagtgaaatctcttcgaactgagcacattagggcgaaaatttttcacggcccaaaattgaggcccttgccctgcgagcttggattcttttaattctccgaatagatcacacggagaaaggctgtccttgttttctcgatccggatgtttcgaaaaacagccgcggtagacgatcgcttttgccgacttggttccccagttaggtctagaacaggactggttctcgaatggccccctggaaccgtttagtttaacggctttattccatgggtgtgggatttctggggaaatgtgacagcgacagcggcccaggggttgtcgaaaataaccggccagtcacaatattcctaatgaaaattgtgaaaattgtgaaacgggggcgtcaaagaaagtgctgatcgcggctcgtccacgggcatttgcaataacacgggggattccatttcgagacaatgagcccataaaagattatatacaagactccatcctccggagagtcatcgcttccagataacctcgggtggcgtcttctgcccactaattgccggtcgtcgtggcccgtgcagccgcggcatcatacagagccttgatatccgcctgccactgcttcacctggactctggccacgcgacggtcataggtaagcagtccgttgacctcgccctcgacatcggtcgtctgggtccagacccccccactgcatgcgtacaggcggatctgatcctcgagctcggtcaggagaaggtgactacggtaattccatgcctcaatggtggtgtcaatctcgtacgtctggtcaattgtatcgatggccgcttggttgttccacagatgctccatggacacattactcccgatgccgccgaattcgccctggaatccaatccgggtgggatcgtaggggctcgagggtgtggaataaaagggggtgccacattgtggatttgcgtaatggtgattgtcctacgagatgttagtgagccacgtggctggagcctgggccacaggggcacatacactaaagtctccagcgccgtggtcgtcccagcccgtcgtcgagtccacaagccgagtggggtccagctgtctaacccgctcggtcagctcaaactcggggtagtattctgtgatctggccccaggcttcgttgtagatgacctagatagtggttaacgtctggtctttcggtttcacatcatgacttacccaagttacgatactagggaagctcttcaattggttaaccaacaggtccaactggcgagtgaactcagcctgctgcttctcgtccggtaggatagtaactgagtttccatttgcgtccctcttggactgcgacgggcgcagggaaggcatgtcctggattacaagcagaccgagctcgtcgcaggcttgatagaacagatcggtctcgactttgatctacattccacggtgtgagcgcgagaaaccatgtgatatgcaacgcggcgacactcacatgcttgcgcaccatgttgaatcccaacttcttcaacatttccaaatcgtacaccatcgcctctttgctggggggcgtgtataaaccgtcgggccaatagccttggtccagagtaccgaacatgaaaatgaattttccattgagcaggggtcgctcaattccgtcaaccgtacccctggagactgtacggaagcctatatagctctccactagatcttcgccaagtttgacagtcacattgtacaggtttggggagtccggagaccagagtttgggcgaagatacgatgaattggaatggctcgttagtggggcctttgtgggttgcaacagtcttgccatcttgatggacagtgacttcggcctgggcggatttctccttagcagagctgtgtacagtgatatttactacacggtcagaatcaagcagcatttccacaaactcagagacttaccttgaccatccatgtttgcgtcaagatcgagttgggtgatgtgattggatggggcagcctccagccaaacagtttgccatatcccactgcacggggtataaaagatgtgactaggtctcagggtctgctttccaatggggatcacatagtccccatcgtcggtaggatcatgtacgaaaacaagtctgtattcaaagtcagatgtgcagactgtttaggaccctgagatactcacagctcattctgctgatcaaacttcaggtactttgtcacgtctaccgcgaagcggaagtatccgccacggtggaagcctgccttttcaccattgacaaagacagtggcttcgtagtctacggctccaaaattgagcagtacctgttcacccttccaagaaggagatacctcgaaggatgtcgaaaaccaagagtacaaagcccaatcgctttgaatgcctgcgaatttatcaattctcgatgctaacgcagtaagcaggagaggacctaccggacaatccactctcaagacacgatggaatcaaaacatcctgcgcaagtacctgcccaaaagggggctgctgaacagcatcgagaccttcggcattttggtacttccacaccccgttgagattcttccattcagaacgctgcagtaacggtcgcggatattcgggccatgggttcgttccgactttgtcggtccatggcgttgtcaagggaggctccttaagagagtaacccacactgcgcgccttgttttcctggtgctcggtactagggagagctagaccagttgccactagacacgacaagagaaaactctgagccaaatgcatgttgactggagaaactcagatcttggcagtatacacacacagtgacagttccaaaggtcttcggaagatatcacattttgggcatgatctggacttaaatacatcggaccctgcttacgcgggactagcagactcatggcacggtgagtccctgcatacaacatggccacttggcagagatgcacccacaagggccaaccctgcaggaagtacacaggatgcccggaaactcagattcactgaggaccggaagtatgtcggccgctggctgttgtccgaacacagggagcatcacccaccgcttggcgttactaacagcgcaggagccaaggacagcagccaagagccgacggtcgatgcgcgaatagtaattaaactacccatcacaaggaatgagctggatcttgcctgctacgggcacgctgggttctcgagataggtggaaattgccgacgtgcaataataactgtctctcggcagttccaggagcgacaaataacagcaggaagaggtattccgtattccacggagcatttcgcgccagtaaaaacacgagtcacgcgacagaacgttcggtctgagccgactgctctgcccaatactgcgagaatattaacgccgatcgcaacacacgggcgacagccgatctggctttaccccagacatgcatttcccgtgcaaggaaagtaatattgcttgctgtctcatctgttagcggagatatgcagcgcatctgcatatccaagtcaaatctaagaatgaagtcatgtttacatcgaatgatttgatcttgcattgctagttcagcaaggatcatgtttcctggccaatcccttgcgtccggattgcatggcacaccacgtccccaccctgagcgggatatatatttgacacaatggtctggccataatctgatctcgatatacttaccattcactcgctcctcacaatgaactagcattgccctaccccgcagactccgatgacgtggtagcttgaggttgtatcagctttcaatttaagaatccgaatggccgccctgtccctcagagtcaggcttggcgcgacgatcctctcttccctattggcgggttgttttgtccgttgctgtccgcttaagcccaagacgttggctagtttttggcttcgttcttccccacgttctacgagcggggcttatggtgagttgagtcgatgttccaatcatatattccgaacttggatgatgggaatcgtggtgtgatagaaaaatacataaccagcttttaagcaaatgaatactttgtccttgattttggagggttcttatctctaaccgatctatgtatgacctttcctgactggctaagaaattcacttctaacggctgacgctagcaagaaaacctcatcgtaggctagtgtcggttatgccagccttaattcggaatacgtacatgtggcagattacttgcatattgtatattgtactagaaagtaacgtaacgtcggcagtggatttcttttgcaaaaaagaaaatgatagatggcagtgttgctgtgcaacgggctcggttacagccggcaatattgtacagacggacaatccgattgcgaaagatggttagaaaagcccaaaatcccaaaaatcccaatgtgaactaatgtattgcggtagataggacatactactgtgtagtacgagggcttctagggaccatcacgacaaccggcctaatcgggttaccgcttagggctagttttttctgccggttgggctattctgccaaagttagccgattacatattcaccgcattaaaactaattattttggagtaggataaaaataatctggtcacgtgatatatacacacacgaggttatgatttacttgcttcgcttcgctccgcaatcatactatactccgaagtatgaaataatttgagtcaagggaattcttgctggtactagatgctcacatccctagcctgaattttcagtacggccttcctaatttggtaatccctatcggcacagtcctaatttggtcgagaaccgggtacctgcctggacacttggttctgcctaccgctctcttaccgcttccaaacttgtacacggcgaagtatggcagaaatatggcagaattcttagttgtacccgatcaggaaggcggtattggaatttcaggccgagcatccggtacgggcaacaattcccttcatttaaattgcttcagattcatagaccaggtggtccctaaatagcttcatctcttcgggcattatcaggcattaatattactcctactgatgataaactttggcacctaatcgtgtcgaaaacacataccgtgtgttggcgcctggcaagttggttaggcggtatttttttttctcctaattttctgcccggcaaaaaacccattgtcgtgatggtcccaaaaagtcctcgtaactgtggttgatttgcgctttgaggctggcgaaatggttaaactatagctgccgactgaagaagaatttacctcgtgccaagcttctcatcgtggctataaataaacttggtgggcatttccatgcctggacctaataacacgtaatatttgataacattcaaaagcaataatatgatatgaagatatttattctgcgttcctttcagcgtgttgtatcatatgtgtggtgtaacgggacatggtgagacaaagccaagatccgttaggaattgtagatgcttgacctgtgatcatatgcatctggcccattgagtagaagatagtcgagatatcgtgtaccaaagagccagaagataacggcgcagatcccaaagtatctagctaagggatttgcctgtatctaggagtttgcgagtggcgagcggcatttggtaagtactatctagtccaatcacattaggagttctccgaaatcccagggaacactcagaatcgaacgatacaatccccatcttctcgtcagcatagtgaccgctcatctccatcgggattgaattgatatcgggatttgggtggaacaatccgggaacgctttgtatgaccccgggattagggcagatcaccgaagttctacaatgatcaggtccacttatctatcatggcgtgatctgtatcaaatttagccctaacagaccccgggcttatcatatgtaggtatgtattggctttaatgcggattatcgaacttccgggattatcttctctcgtgacactgcattgaagcaaaccccgtgttgacttcccgagttgcactttactgccaaacatggcgacgattatagaattactccccgagtccgagagcttccgaatctcatgatgttactcctcttgtacttcggggtttggggatgtagactatcatttcaagccaacgtatgaggccgctggaagtgttataaattgaggatctccccaggcttaagataaggatttccattctacacaacagtcttcaaagcaaacactcgtcaaagtacaacaagcatctcaacatggttaccgttctcaagaagtacaaggccgcagcagtcaatgctgagcctggctggttcgaccttcaggaatccgtccgccggacaatccactggatcgatgaagcaggaaaggctggctgcaagctgattgctttccccgagctgtgttagtatcacagtcccaagtaccggatgcaatgtactgacaagatgaatagggattcccggttacccctactgggcttggaaggtgacctaccaggagagcctgcccttgctgaagaagtaccgcgagaacagtctcgcctccaactcggaggagatgcgccgcatccgcgaggccgccaaggccaacaagatttgggtgtctcttggatactcggagctcgatctcgccagcttgtacacgactcaggtcatgatcagcccagctggagatgtcatcaaccaccgtcgcaagatcagggccacccacgtcgagcgccttgttttcggagacggcactggcgacactaccgagtcggtgatggacaccgagctcggccgcattggacacctgaactgctgggagaacatgaaccccttcctcaaggcgtacgctgcctcgctcggtgagcaggtgcacatcgctgcttggcctctgtaccccggaaaggagaccctcaagtaccctgacccttacaccaacattgccgaagcaaacgcagatgtatatttcccccttctttatttttgcaacgacttgatctgattactgacaagactgctcagcttgttacccctgcttacgcagccgagaccggtacattcactcttgccccgtggcagacaattaccgccgagggaatcaaggtcaacacacctcctggaaaagagcttgaggaccccgagatctacaacggaaatggccgtatcttcggtcccgatggacagaacctcgttccccaccccgccaaagacttccaaggacttcttttcgttgacgtaagtggagaatatttttgttctatcagaacgtcaaactaattgatcaaacagattgacctcgacgagatccatctgagcaaggctttggccgatttcggcggccactacatgcgcccggacttgatccgtcttcttgtcgacaccaaccgcaaggacttggtcgtgcgcgaggacaaagccaatggtggtgtcatttacacccggactattgaccgcgtcggactttctcttcctttggattcgtcggctcctgagcctgagaccgagaactgagtctcaattcgagagtatgtagatctatttgccggactctagcagatatgtgtattgtatgacagaagacagaaataccaacttattcactcttttaccttttatccatagtttgagtgtaacttccttttgctctgtcacctaaaagaggttgagccgaactgcagtgacttggttcagacctcgagggcccagacccgtgaaacgcgtggacattccgttctctcaacattcttcacattctcatgcattttttcttatacctcaaggtaacaaattcagagtccaagacctccaaggtcaagttgcaaccatgtgcagaccaatactctacccgatttgtcgacgggccggcgagcagacaatggcccggagagtgtaacaatggaattgtctggggtacaatgtctcagatataatggagttgtcgccggaaacagaagtaccgaggacgacagtcgaccattttgacttgactataccgaccactccacattcccagcgtatttcatagtgtaatgggttttgaataattctaagatttctttggaggactttagagtgaacaaaaaccttaccacagcgatgtgcgcacttagtcccaaaaatacccttatcacccttatgaaacagcattcgatctgcagaacccaagaatgattaagttcactcttacactaacactacgtagagtaaataattttaagctcaagctcgacgtctagaagctgtcaagcaatgacattccgtaaaagttgtcggagctgccacgtgtcgatcatcacggaatgtgagattttgctgcaagcagaatttaattcttttaatagttgaacatgtaggctattatgtgtgtctatattagaagtatcaatgagaataaaagtggaagtcgcaagggaagcctggttttctaatttgatatagggcaatgaagtatagcttccccggatactattttgggtcgcagttgccaataaaacacatagtgacgaggtgacgaggtgacagacattttcacagcctttatccccacattatccaactatcattgttaccctcgtcaagagaacaagccctttgtctctgttttcggacactccaccttcctcttgattcagacctcgaagaatagtctatacaggtacgttacttttacttcaatctccatcattccccgtggggacttccgttctcgcccagtaacctttgtttccctgcatccggctacatcaagtcacttataactgctgttctccagccattcatctcaaatatattcattcctgaatcttcattcttcattcctcattcctcattactcaacaccagcctcctgacttcttaccaagttagggttatcagcatgccgtccatgtccaagttctcccaggcgtccgtgctcggactgtctttattggtagccttggctcaggctacgccaacagtgtgagtggtatctctctatcagagctaaagatctacaatactaaccgacattggtgtatagtagcctaaaattcaactaccgtggtgacaaggtccggggtgtcaacctcggtggctggctggtaacagagccctggatcactccatctctttttgacgcagctggtgatgctgctgtcgatgagtggtctctttgtgagactttgggtgcgaacgaatgtcgctctgttctgaccaagcactggagcactttcattaccgccgacgacttgaaccaaatcgccagtgcaggaatgaaccacgtcagaatccccgtgggatactgggccctgaagcgcttggatggtgatcattatgtcgatggtcagctagagtatctggaccaggccatcggctgggctcgcgccgccggtctcaaagtcattcttgacttgcatggaggtacgtgtcaggacctatatattacatagcaaccactgaccaacaatacagcccctggctctcaaaatggctttgacaacagtggaaagcgcggttctattcaatggcaacagggtaacactgttgacgataccaaagatgccttggaggctctcgccaaacgctacgaaggcgatggagacgtcgtgactgcgatcgaggctttgaacgagcctagcatcccaggtggagtgagccaagatggtctgagacagtactactacgattcatggggccttgtccgaaaggcaagccaggacaccacaattgtcctgcatgatggtttcgtgcccactgaatcatggaacggcttcatgagcgagtctaccggtgtctggtatgtgatgatggacacccaccactacgaagtgtttgacagcggtcttctcgccatggatacccaaacacacgttagcaacgtctgcagctttgccaaagaccatgttgtgacctctgataagtgggctgttgttggtgagtggaccggtgccatgaccgactgtgccaaatacctgaacggaaagggtgtcggtgcccgctacgatggtaccttctccggtagtcagtatatcggcagctgtgagggcaagtctactggatccgtggatgctctgtccgaggatgaccgaagcaacattcgtcgcttcatcgaaggtcaacttgatgcttacgagaagggtactggctggctctactggacctggaagaccgaaggtgctcccgagtgggacatgcaagcgcaaatcgctggcggtgtcttccccaaccctgttactagccgtgaattccccggccagtgctgagcgctagctggtatgtgccttgattctcctcctgtttttccaatgtcgcatggagcatgctactgattttgccgtgtttttgttttcttttgtccaacttttgtccagacctgattcgtattcttttaattgtctgctgggcttgcgtataagcgagttgattcctcgcggttttatggtgtgcttaatttttaaggctcgctggttaggttgtgaaactgataattcaacggataatcgtctactctcttaaggccttcttgctggaggatagccatcttccctactagtatttagtaaactcccaacctaggaaggtacacgtggagactaccggggcaaccttgactaactttatctcaaaatgacctcgataagtaccttacatggtacctcccctttcctggagaaggctgtgttttagtaggccttctttttccttctttttcttttttgggatctcttgcctagcgagaaataaaatgaatcacaacaattccaaggttcatttctcattcgcaatgtataagaattaaggtctcatgaaagatctatttttagcaagtacaataagctccgaaaggatatctgatggattgggatatgtggctgggattctgggaatgctaaaaatggaataggtggacctggtggtcatgcaaacataacaatatgagggtgtaaaaagcatatacaatgaaacggaggcaatgcaaagtcccaatgatatcaaaatgagcaaggggtcttcttcctacctcagagcagtccaagtgctccaaacgccgcaacaacgtcagtgtcaacgttgactagccattcgtcttggaaccgctgcgccccaccacagccagcaataacctcttgcagacgatggcgcacaaagtcccgaatcatgaagcggtggattgcatccccggactgccagtcacggcgacgaatgatctcaggcgattcgacctcttgtgtggtttctggcatcgccgttgcagacccggctggtgcattccagcataccaagtaatcggcatttgggtcggtacttccgtctgctaactcggtaataagatctgtccatacacttagatatgattgcaggaaagagaggatgtaggcagggggtggcgggggtaaagacgggtcgagtggcgctccttgtagggccaagagttgggtgagggcaagtacgtgaagtttcttttggttgatactgccaatgttatcgtagtgcaaaaaccattcggtcatgatccaggtcagagattgttcttcggatgagttggtcgcggcggcgaccgatgaggctagaatggtagggctggccagcgcaagacgcgctagcacagagtagtaatcgctctcgacgacaccgaccacaggtgaggattttctatttgggccagacgtctgactcgcttcgtgggcagagtaaaggccttctagcagggaggcaaggaatgagctctccagaagggattgggaaatgacacggtaggttgcttcgctaccgccgtcgacagtctcagcgccgcgaagcaataaatcaacaaggcgaggtatcacaccgagacgttgcttggttgtggatttgagtagtgattcaaggatcaccaggagttggaagcggaaacggtcactgaggatctcctgtggcgcgaggaacacataagattcaaggatatgaatggcctgcggagtgctatcggttgctgcttcgagaatggggaacaaagacggaaggagtgatatgatctccggcgaggcaggagatggcgtagcctgaattatggcatgccagagatccagtgcttcatctagaaggtaaacaatagtttccttgaatgattaggttaagctgggtagcatgattcacacgggacttaccgagccaggttctactgagctttggatcagtggaagaatgagagagtgatatctcacagactcctgtcctagcgactggatcaaagacgacagcaaagtcaagatagcttgtttcatcaaatgctcatcaccggagctttcccacaatggtgggagtaaagagatgattcgatcggagaagggagtgatctaatattgtgagttgcacagtcgccaacgaaaatgaggcaacaacttacatgatcttccatcttgaccaccaccatacggaccgtctccaaaagccccatcttagtatccgaggattcgacttcttgaacgagagacatgagactctccaagatggtaggcgcaaacgacataaatgcttcgggtgaaaactcatatgagtcaagtacactccggagttgtcgaccggcagtaatgcggacgaccaggtcgttcaaaggatcatgcttgccgagcaaatgctggaagatctggtaaattgcgttcatgttcaggtcgcctgccttaaccgggacccattggccgagaacgagcgcgattcttctcctcagaagcttgtactctggttcctgagactggacctcaacaaccatggtatgctccaagaatgcgttgaagtccaggtgatgttcgagactggccgcagccaagccgacggcagaatacagcgagtctttcaacagcacattgtggttatcggtgcctggagtataagtgttagagccacgcacacttaatacagctcatcaataacttactcgcgaaagtatagaatacggtcaacagacgtggaatcagtaaatccttgaagtgaatcacaagatcaaggaaaagtttttccgaacatgaacggattgagaactcccaagcgtcggcgttctcttcctctcgcttctcccagtcctccggttcttcttcccactcttggaaatcgatcttgcggaacctgaagaactgagtgactagtagctccatgacattgatcacaaattcttcggtgaagagttgcgttttgacgagttgaacagattgttttcgctcctccttgtcttccggtgtctggtatttgaacgtattcgcagggttgaatgccatttttgcgcatgcacggatcaagagcaaagcccggaggccggtcttctcaggtaaagatttcccttcattttcgcccccagcaccaaggctgtcatacttctcgccgagtttgacgactaatgaccaatacgacttgacaagcgagatactatctggcagcaacgcgaaagatgcggggtgtgtctttgccatttcaatatgcaatttcgacatctgcagcaaatgtttctcgatagcgcgatggattggctcgggtagattggtagacccatccacaagagaatggaatttactaaagtgcgaatgggtgagctcccagaagccctgtacttcttggctgcgactcgggtgttcaaagccagcaatgatcaggcgtcttaagaccttgagagataccaaactcaattcgagcgtctccagcaactccccttcgctggcaccaccttggtctagtatcgtcccccattggttgactttatcaacatagatgccccccagtaactggaatatctcaggcgatacagactgaagattgtgtcgcgttcgttgaattcgtgccgtagataattccttgattatttgtagcaacatgaggagagttcggggaagttggagcgggtttgctccaggttcgaccgatgatcggagcgaggaaataatgaacagaatggcatcgggcctggttggaattaggatgagcaaacatacagctgcatattggcttaccagtcatgaggaaactcaaagcgcatgattttggcaatcatcagcgagttatgaagagctagtagcggtgcgggctcaacgattcctgcctcaagagcccggctcttaatgcgttccttttcttccggtttaattgcactttcataaatgttagcacgacctcatcttggcgatattcccataacatacttcggagctgtcttccgccagtatttgtcaatgccgttcttcagttggatgatggcgagatagcgaatttcatttggtagggagtagtcaagaaaggcattctatatattatcaaaggtgttattgagtgaagcagcaacaaacaagactgtcgactaatacctgtagaaaagagtagtacatgccctgtttctcccagtattggagctgctcggtgcccgtctgaacttgctgctgagacgagcttgccgcatgtactagcgcattgagcacattttggggggtgagtgggttggtctcaccctgtacttcgacggcgaaggccatggcgaataacggtgctgatcgcgtgaaagaagacttgtaaagcctaaaggcagttatactgaggcatgcaccaaatcagaggttcattgaggtaccctgaaccactggacgttcatgaaaatgaactctgcgagagttccgaatatgtcaattgatcaacggactgacatgtctcttcggagctccagcgtaaactccccgcctccgggaaatccatattccggtcccgctgaaccctagggctggaccctagcgtttgtcccgattcagaactcctgctagggctcccgaccgtttcccttcggtggagactatgaggtgtagcctcaaaccagtttggtcggattatcaagctaccggcaacttccaagattgttctcgagtaaaaatctctgattcaccactgttcctggattcttcccctcgtgacatacctatgatgtagcatgatgcaactacaattcctaacctgaagtgaagtagtcatgatgtggatgatctagagtgatatatatataaagcgcaattcagttcaatgttcatctcactatctaccaaattatctacacatacatcaccacatacaaaacctgaaaacatcatgcctaccaccgaagaattgaagcatgtatctctcaacgccgagaaggaccttaattcataccaggccaagcagggcagcggcaagaagagtgactcaagtatgtgaagaaattggtcttagtcggtctcatttatctaataacaattcaagctgccgagtcaggtgttgacgagatggtcgagcggcgattcccccagcccacgagtgtgaagtacggccctggctcagctgcctctggtagcgaccaccgtgtgattcccgaggatgagggcggcgttcgtgatgaccgcaacaggtaagccatacacccaccgcttctctatgcgctatgaatcgttctcattgttaacataacgttctttccagactcgctaaggctggtcagttcgagggccctggcggcccggaagacaaggtctaggtcaagaaccgtcgctgaattgcccagtaaaaatgcataatacaaatgatacctgatgacctgtactataatgaaatcctttcattcatttgatgtgttcaagccccgacttatacccgaccaggttaggcctagtaatgaacctcaccaatgttaccttcccggcagggacaatggataccaatatcgacatcgccagccccgctttgcgattttgttgagatttgtagaatcgtagagaatgttcattccgatcattttctggcccctttcaaacccaagtgctggcttcacttgtgccacccgaccactcaggtgagaaactgtaggcagtcccaaggtatatcctaagcacggagtaatatccatagatatcagtagccctatatccatagtccacggtgtgtacacaactccgaaggttcatgtgggtttcctctcccacgtgctcacctgttcttttgatcacgggaccgagcacgcccctaggccaagcccagtgatttgcctgggcaccactcactaaccatccaaatctgcttatctcaagaaccctgggaaatgcaccacatgggcacgctagcgccctatagttccccacctcgcttggatctgtctcactaacggaaattacgagaaatcagcagaagtagattacattcatggatacttgctgtctacgctatgtgccaaagtgcatacatgtatgcccagctacatttatgtacagttaatagactacccgtgggctcttcaaccacctaaagctgctatcaggggagaagcacggaaagaccccggaactccgggggcccgttgccatggaatagctaagttagctaagcattcgccttggcccctcttgactcgagccctcgaacttctgagcttttcggccaatcagagggctccctttctccatgtgcctgcatcatacaacgtctactctacccagacctcatctcaacatcaggtacggctcacaaagtacctctgtgagacttgaaagaaagctgaaaggcacacacaaccacgtgtacctgttcggtataccttccttcaaagtttatctccgacgtagatgcacgtgtatcggccctgaccccgtggaccttccatacatattctggcatttctaacattcttgacgatcttttcttctttcttctctaccatcctcattctcctcggtccgcctcggtctcatctcatcagctacatcaatcttattgattttctgcgagatctatcaaaatgaaggctgtcatcgcggttttgctgggagtggctactctgacagttgctcagacagctactacctctgagcctgctctcgccgacattcaggctgccgaaaccaccaagccggaggttaccgtctccgatgtcaagggcctggcttttgatcgtttctatcaagtctggctggagaacattgtacgcgacaatgatcaattcctggagtctcaaagacaccatggctaacagcttgataggactattccgatgccgcctcagatgccaacatgcagtggctcgcttctgagggtattctcttgtatgtttccaatgttttgagccatgagtgagatgacccattctaatattttttaggaccaacttctatgctgtcacccatccctccgagcccaactactgcgctgccgctggtggtgacacgtttggaatggacaatgacgacttcaatcagattcctgccaacgtttctaccattgctgatctgcttgacaccaagagcatctcgtgggctgaataccaggagcacattccctatgctggtttccagggctacaactattccaaccaggaaacttacagcaatgactacgttcggaagcacaacccgctggtgctttacgactctgttgtgaccaacaacactcgtgcacgtgctatcaagagctttgatgactttgaaaatgatctcagtgacaagaagcttcctcagtgggccttcatcactcctaacatgaccaacgatgcccatgacaccaacatcactttcgctgccaagtgggagcgttcttgggtgagcaaactgctcactgacgagtatttcatgaacaacaccctcctcctcctgaccttcgatgaggacaagacctacaccaacgacaaccgtatcttcagcattcttgttggtggcgccattcctcaagagctcaagggtaccacggacaataccttctacacccactattcgagcattgccagtgtctccgccaactggggtcttccttctctgggtcgctgggattgcggtgccaacatcttcgagattgtcaccaacaagaccggttacgtcaactacgaggtggacaagacttatctcacccttaaccagacctaccctggtcctatgtcaattggggacgacaccattggcaacacctccacctacactcccgtgtggcccattcccatcactgacagcaatgagaagtgttctgctggtcacggtatcctggattccgtcaagcaaacctacggaaaactgaactcgacatacgacaccaagccgttcccctgggaagccaagactcactacaacgacaaggtcacattccagcgatcaaacgagaccacgaacgcgaccgccacgactaactcgacagcggcgagccctacccacactggcgctggatttgctgccacggctcctatctctactgtcatgctcggagccatgctggccatcgctgccttttccctctgattgagctgttccttatccattcttactagttgaccgggtgtgggtgtgggtctatgacccttgatcatctggtcccgattgactgggagggaatgttttctccaaatctaggagacgtaaaacacaatcagctatctccatctggaggctaatatcttaagctttagttatgaatccaaattcgttattatgatatttatgtcccattaaagactactagaaggaccataactcccactgcctagagactggcccctttatgtagctgatcgccttttcctgactatctaggtgtcggataccgttaaacactggatcttcttggtggagctaggtactttgcatgatcgtattgtactcaattttctatagccccgaaatgggatatccattctcaaccatgccttcggttcaaccagctatctttcacagacgtgctgtcttgatcaagatactcttagtctcaagaaaactgtcaagactatacagaagcccctcccggccactcccactcattttgaacccaccaaatgcagtatccttggcatttgtcgggcttgtgcaattaaccccaacagtacccgcatccagagccttcgccaaccgaacggcacgatcaagatctttagtaaagacagcagcgtgcaggccaaactccgaattattcgccttctcaatcgcaaacatggcaagtgggaagttccacgggataataagtgctaccacgccatatggctgcttgacggtcaggtttaggtagtccggggtgttgaggctggctgtcccctgcgcggtccaaccgccaccagcgaagtatgcaaatagctcggctgctagactggcgtcaaagaactgagagatcagtcggccagtggagagcgtttcgagcttcgccagctcgtcgtttgactccaagatgagctgagatagtttgcgcaagtatgtgccgcgcttgtcggtgcccaagtctcgccaggcggggaaagccgcattggcagcattaacggcgtcctctacatcttggatgtcggcttcttggactttggtaacagagtcggtgttagcagtatgttggcttttgcggagaaggggacacaccttgcgcaacaacctccttggttatggatataccacttcgaatgttttgccactagacgattttcgaaactagaaggttagtatgaagaagcatcattgtatatgaatagcagcctgcatagttacctcgccgttgatgaacagccgagtctcgatagattcgttcatcgtagatgccatagtggacagtgtgacagatttgacaataagtgaatcaagcataatcacgcatttagtcaggaaactaattcaacattgggcgatggttctgatttatatgcatgccagggagtccatcacctgcgccgacttcaagctttcaattggggctttcatttgaaacccaatcattagtcctcagtcccaaagccaaggacacctccgacattagttgtcatggatttcattgggcaatgtggttgaaatcgtacaaagtcatgtacaaatgacttgcatggatcaattgaaatggattatgttgactgctcagataccggtgtaacaatattagctgggcagtgaagtatcaagttatatgagcaactaaccgacctcggaccacttgagtccatgataagctcttgtcatggatgccttgatgagattcagtgactgggcagggtatctccgaggaccttctgagcccaccacaaagcttttcaatataacgttgtacctcggcagttacacgttagaatcatgcttgtatcactcagaatgtatacacttcttcactactcacaattggcaaaacagcattggaaatgcaaaagtcacgtggtatacctcggctcttccgtctggggaaccgagcgcggtcgatgagctacgccgggacccatttccccgtgctctcacgaatccccaaccagctccctcctatcatccacaaacacgtcatgatttcgcgatgagttcaacaaacttcgccgctgcacaagaacgagttcttcaacgtcgtcgccagcgtgaggcggaagcgcgcgcccgctatgcagcacagcagcgggcctctccgatcagcccggccaccgtccagcgtctgccatatccattgaatcgattacccggttcggggtggcggatatggaattccatcaagggccgggaaggcacgcgccccgcatttcgagtgggccaggtggacgctgaattgttggatgaggagttgcttgggctgctgaagggccaggtcggggatgctctcaaatacttcggggtatgtctgaatgaggctctggggtgttgtgagaaaaagtagctgacaccgacaatagcctcaaatgcgcgaagattggtcacatgagattctgttcgcgttacgggccatgctcttcaaactatcaatatgggatcataacgcatcgtatggtgcggcactacaaggcctcaaatacaccgatagtcgaagcaaaggacccgttttctcttctccgacaaaatggcagaagggtatttatggcttattgacggttggagggcgatatgcttgggagaagtgggagagctggttggtcggacaagaaggtggctatgacgaggttagtgccgacacattgctctctattggcaatgctttactaacagatactacaaagccatcaccggacatccgaatgctgtcgcgactaacagacatgatctcgacatcgcactcgattgccgccttcgtctctttcctggtattcctagtgaatggccgataccgtaccttggtcgatcgcatccttcgaatccgccttactccaccgtctgcgcaggctagccgggaagtatcctttgagtatttaaaccgtcaactagtttggcatgcctttaccgaattccttcttttcctccttcctcttgttggaattggccgctggcggcgatggatatctcgggtctggaaaaagatggtcaattctgtccggtcaagcggcgatgacgacgagacccccgaaaaacaaggagagctggccttcctcccagagcgaacctgtgctatctgctactacgatcagaaccccaccacaacgaccgaaagcgataccatagccgcctctgcgtcagggggtattgtaggatcggcgcaaactgatatcacaaacccatatgagaccgtcccttgcggctgtatctattgtttcgtctgtattgtgcagaaactggaagcggaagaaggccagggatggtcttgcctccggtgtggtgaaattgtcaagaagtgccaaccttggaatggcgatgtgctagaagaggcacggtcgcagcctggaactgggaagattgttggctttgccattgacggtgaactgaatggcgagacccgtgggacagatcttcatcaagggggctcatcaaataagtctagcccattgcaagagatcagtgccgatgaagccctgcagcattcagagcaatggtccaccattgagaaagaggcagaagatgatggcagaagaggtacgaacgaggatgagggcccaaaccctgctgcgatgtgacagtactcttaaggcacacgcctcacaccccgggtgctcttgggggtatgtaatggccttctcttctccgacttgtttataaatatacaattacctgggtagtcgcagcgcatatgcccttataaaatttaacgatacccatactcgaagaccgaagtttcctttcacataatcatacaagggattcatttaacaaatagcggagaatttcaatacggcacagcttcacaacttctggcattcccctttaaggaatcatccagctagagacagcagtatagaacccaatgccagctccaatgagtggaaacacagctctgatcaaattcaactgcgaccaatgctgcagaagttcaaccacctcgccatcctccctagcccgcttcgccttctcttgtggactaactaccatgccctcggtaccctcagcgtcagccgcatcatcgcgctttgcatgagccttcagcttggtatttgtctttctcataactgtaagagtaaaaggcgtaatgctcatcgtaaacccgatagcaagcatatagcacgtggaccagctggacccaaagatatccggcgcaggggtagcggagtcccgcaatgcccagagcgcatacaggtttgcaagtgaagataccgcggatataccggggaaaatcttgcttccacgagtatatatatcgagccactggtgtgtcaaatggccgggcgaggttcctggggtatcatggaatggcagggtcgcgctgggtgggcgacgggctggaattatgagattggggatgcttattatggataatgaagcaatgccgccttgtacactatgagtgtctggtcatctgttgcgtaggcagtgctacttacctgctcccactgcagagccaagcgtccctattgcctgggcgattctcacgtcggtggccattatacggctaatgttgtgctcaggaagtattgcaataagagagttcggtcaaaggagcagaatgctgcttttatgctgatagcatatgtatgacgtctacgaagggggaagtgacatgcctgattctcatggtatacctcaattaggcctcccttctatattatcttcaaccgcctttactattgacgctagatcatgaacagagagaatagatatctagtattgggtgaagatagaacatggggttagcttcattttgcctgcctatctaaatcagacatctaccctgaaaatcaggcatccaacttttggcccttcgcgttggtgccatggatgatgtggcgagttgcgacgatccctccattgtaaataaactagatatttcaacctgaaccattgatatacaaactcataatgccatatgtatacaacctcattagatccggagactaggcccaactccgatctgctcataaatcggccgcatctgactggacaacgaacgtggggtcctgggtgtcggacatcggtgcgaaaatcgagctcccgaggttgtctgggctataattctggtcaattgcatctccaatctctttctggtttcgttatcatatagctatcatatatcatcatggatccctcaaagtcaaccgtgcctagcactctcagtgaggctaaatacatcaactttccttctttgcccacagatgcgaagcatccggatggctcccccgcactcaatcgttactcccacactattaccaaaggccatgatttccccggcgcacgggtaggttggctataagaacactgcaggatctattactgaccgctataggctatgctctatgccgccggtgtcccagataaagaagcgatggcgaagagcccacatgtcggtatcgcctcagtatggtgggaaggaaacccatgcaacatgcatttgatggatttggccaagaccgtcaagaagtcagttctggaacaaggaatgcttgggtggcagtacaacacgattggtgtttcggatgcaattaccatgggcagtgaaggttggtttgatcctcaactctcatctctagcaaacgagatagctaacaccccgctaggaatgagattctctcttcagactcgagaaatcattgccgatagtgttgagactgtaacctgtgcccaatatcacgatgcctgcattgctatcccgggctgcgacaagaacatgcccggtgtcgtaatgggtatggcgcgccataaccggccctcaattatgatctacggtggaactattggaatcggctattctgagcacctgcggaaacccatcaatgtctcaacgtgcttcgaggctgctggtgcctacgcctatggtaccctgcgccaacccgacgatggtggtgaccaaaccaagtctcaggatgagatcatggatgacttagaacggcatgcttgccctggcgctggcgcctgcggtggtatgttcacggccaacactatggccactgctattgagtcaatgggtctgtcactacccggctcatcgtccacgcctgctgaatcgccatccaagatgcgcgagtgtgttcgtgccgcggatgctatcaaggtttgcttggagaagaatattcgaccacgggacctactaaccaagcggtcctttgaaaatgctctcgtaatgactatggcgctgggcggcagcactaacggtgttcttcacttcctggccatggctcggacagctggtgttaacttgaccctggatgacatccagcgggtcagcaacaagatcccctttattgccaacctctcacccagtggaaagtattatatggccgacttgtatgagatcggaggtgtcccatctgtccagaagctgttgatcgcggccggtctacttgatggagatatccccacagtgacgggcaagacgttggccgagaacgttgcctcattcccttctctgaccgagggccaggatctgattcgcccattggacaacccaatcaaggcgagcggtcacctgcagatcttacgtggtaaccttgcaccaggcggtgccgtcgccaagattaccggcaaggaagggctccggttcgttggcaaagcccgtgttttcgataaggagcaccggctcaacgacgccctgaatgagggccgcatcccgcgcggtgaaaaccttgtcttaatcgtgcgttatgagggccccaagggtgggcccggaatgccggaacaattgaaggccagtgccgcgctgatgggagcaaagttgaccaacgtggcgcttattactgacggccggtattcgggtgccagccacggtttcattgtcggccacattgtgcccgaagccgccgttgggggcccaattgcactcatccgcgatggagatgtcgtcaccatcgacgctgagaccaactcgctttcaatggatgtctcggatgaggagcttcaggagagacggcgtcagtggacccctccttcaccgcaaatcactcgcggtgtgttggccaagtatgcacgattggtcagtgatgcatcacagggagccatgacggatctgttctaatgaatcattatgatatgtcacctgagtgtaaatatagcatatttctaggctgttgaaatgatgttatgatctacgtgttctagaaaatttagaaaagggataaacacgacatgatcttcgtggcccgcttgaaattggccagtggtatgtaagaagccacgcatgctggctcgggaggtactataaaatggagtccaacacggagtagggagtagttaccaacatcttgggaaccaaagtgtacataatacattgtagggggcaatacgagagagcaagtggttatacatagaaaaagaagactaaattatactaagatctaacactaatgtacaaatcatctcgaatgttcaatttttcaaaaggtacttcttctcccatagtaattgccataatcaagcaagttccttccaaaacttgtggctgcaatacacaggttggaggggccaatggatgacgatgactcacccccacgccgctcctcccgaggctgtgagtggctgaagctgaaccctccgtgcattttcttatcctcgcaactcatttcaacgttgtcgacctagctatcctcattggtctctagcctacttgctctatatccaaagagcatcaggagcgccatcgcgtggttcttggcgagatcactatcggggggctctgaaagcgcccagcacgcccctccggtacttaatcatgggatccgacgctatctccgccctatatgactcgttaacgtctcaatctgaacctcgaagtgtcgcgactgttctgcgattctttcactcagtgcgcgctaccgcccaaaacgcttcattcgcctctatcgccaactatttccgcggcctctaccgcaatgaaaatgtgaattggggtcgggttgtgttcttgactacctgtgtgatcgctatgactggatgtgggttgttgtcgctggtgagacgcaagcggtcggggaagaaaagctctcgtgcgcaacgtcccgccgctcgcaagacgtcgaccaaatcctcgaagactctgagctcctcggaggaggaggattatgaagatgaagactacgacagtaatgcatcgctgcgacatggaaccaaccccaactataagacggaagattggtcgtctgacagtcagcagcaaagctctgatggtaggtgaatagctcatcttcaccgggggccttcattaacacttgcgcagcttacgaaacggacccgggcattctcaggaaattcaccacatataactcctacactacctcattcgccacttatcccgccattcgcaccttttacagcccgcatccacacctagctcgactcccgaccaaaccgactcctgttccactgatcgtggttgttcatgggctaggcgggtccctcgcacaattccaccacctcctaaccagtctgtctaatgttgcttcatgctttggtattgatttacccgggtgtggattgtccaagtttgcgcctacggattgggatgcatacaccgtggaggctctggctgaactgttagctgaagccattgatcagcacagggaccgtgcgtctggccaggaagtcattctagtgggacacagtcttgggtgttccttgtcagccctcttggcttcatcaacgtcgcccattggcgcaaaagtgaaagagcgtatcattgcccttgttgctatgtgccctcgagccgagcctccatctgcggaagacactgccaaatttcgccgactactttatgttcctggtccaattttcgatctttggcgccgctgggacagacgtggaggcgaacaaagtgcaagtgttatgcggatggtcggcatcgctgccgacgcggaaacacgaaatctccaggtgcgcttcaacaagcaaagtcggacgcctgtttggcgacgcatggcgtggggtacacttcccacctacgataatggtggccacccgattggcgggctccctggtcaacaggtctgggcggggattcgcatgccagttctattggtcgcgggagagacggatgctgtgaccaaaccggtggaggtgcagaagcttttaaaattctttggcgatgcttcagcccatattgcaattgacactagcgatagcagcatcatcccagacgcttcgcgagtccacgaccagatgtcacctccagtcggcgatctcgtcagtgggaaggtgcaggtctccgaaaagcatttggacggtgcccagcggaagcgagtggtcaaatcagcgattttgccggcgcccgcatctcacgcactgctctacgaccgggcgacctatcgcactcttgcaggaattatccaggatttcctctcgtcaaatgtcgacaagcgtctcggtctgggctggcaattgcaacacatgaacacctctggaaagtgggatgtcaagaacctcgccaaatggaagaaggttgtcccagtctcggaacgaatcgccaacacatttgtcgcgctcaagatgttgcgcgaggttgacgaggaacacaatcctgtgactttcgcggcaaagtatcatggtcgcatacacgctgtcatagacatcagtcatgaaagtccagtctataacccagccgaactggaggcgggtgggattcgctattacaagcacccgactatatccaagattcctccgactccagacgagacgcgtgactttattgctctggtcaataacattgaaaaggatattgatgcgaagatggagcagcgtacggaggaagagaaggctctgccacgcccagtggtcggagttcactgccactatggctataaccgtacggggttcatgatcgcctgctatctgatcgagcatcttggttttggtgtacaagatgccattgacgagttcaaccggtgccgaccccctggtatccgacatggtcattttattgacactctatttgtgagatattgcgttggactgaagagagcgcccacgctgtaattgggaatgattcaggcattgaactgagacgaatactatggatcaaggcaacaggaatggttgttggaagttacgaataatgacaactgcgatgaaatagatttttagttggtgtataattagaacatgagaaattgagctcttcaaataatctttcatcacgaattgtatgtgtcttgtagttatgttgtatgtcatgtgaataattaatgtccggaaaatcaggcacgaaggtgtctgatttagagcccgatccgtcaggcacaaattgggctacatcacatgacccagcttagggtacggctaacccaaaatggacaagcgaacggcacacagacccaacccgcccagagttgtgtgtgtcttgaaattttgagcgactcttcgacttcgaccctgcccacctcgacgcccaacgcctctctctctctaatccctacccttcgacccctcgacaagtcgccaaaatgggtggtgttaccgttcgcgatgtggacgtaagtgtcctgctcgatttttaggtcaccagctctggtttgcatgatgtggacggttcgtttctggatgcacggatatcacaacatcggtcgggttatatcgccaggatggaaatagttcgggttgcgcacgcaataggcatatggtttcattgcttatagggaatatgtcgaaaattgagggatgtgcatgcatgttatgagcggcgaatatttgatagatccgtctatctgtcggtattcctcagggatacttgacacaacgactgcttactagcgaaaagctccccacgacgaatgatgaaatgcttccagaaacgaatccgacgcatctgcaaatccacagaacttgaccgatccacgcatatcttgagccacaactaacataacttttctcctccacacaggcgcagaagttcatctctgcctactctgctttcctgaagcgtcagggaaagctccccatccccggatgggttgacactgtcaagacctctgcttccaacgagctccctccccaggatgctgactggtacgactgcaccaaatatcaagccaacaaaattcgaacaaacaattgacattcttgctttcttaaaggttctacatccgcgctgccgcctgtgcccgtcacgtctacatgcgcaagaccgtcggtgtcggccgtcttcgcaaggcccacggttccaccaagaaccgtggctcccgccccgcccaccacgtcgatgcctccggctccgtcgaccgcaaggccctccaggctcttgagaagatcggtgtcctcgagatcgatgaggacaaaggtggccgccgcatcacccagagtggccagcgtgatttggaccgtatcgccaagaccaccgtcgatgaggaggaggagtcggatgaggaataaacgtatcgcaacgatgggcttttaatagttcggggataagtcgtttgtttttgtggttttgtcttcgctacggcggcaagatattggaaatgacggcacaaaaataaaaattcggagcttgcggtcccgtgcgcgactttacgtttgtttcttttttcttgttccactccatatttttttttctgacgaccagacggggctactagcggagagagatatgggcggtgcagagtgcatgaggatgaggcatcatatccggagacttgaacgagagaagagagcggacgagacgttctacacaatccttcccctctctctcttgttgagaggaggggatcttttttccccgacatgttttatgatctccctctcctctttgaccccgatcaaccctacggcgtctttgtcccttttttctctcgtggtctcctggaaataaagagcatgtctaaacactttaaaactgttccgtcctctctctctgttgtagatgtagatgtagacgtcttgtatcatttagccagcagatcttcagcattccatatctatggatcggttctcaaaagcccaatttatatccaaccattgctattggttttatgcaactctcgttcttacatatgtacaagacaagtcttaagttagctcgcattccaatctacttcatttctttcccgactgtgccgcggtatcctgaagacaatcaatcagcaccacatacaccaccttacagctagcacaaggatgtactcaccaaataaacctgataaaactgcatcttgatatcttcatcccccttctggggcgcgaacacaacccgtccagcccatggcacataaacctcattatcggggttagccttgagtctatagttcacgccaccatacaacatgagctcattgtcaccaccgaagtagatctgcgtcggcgtgtgtcggcgtgaagcaacgtgtgtccaaagaccgtggcggagggtgagaattgctacaggattggtcttgttagccgggatacaacattgggcagatgtatattttgcatcgaagtggaaaccgggatcagaagctgtatagcttccccgatgttgagggcggggattggataacaccataccgcttgcacccttggcctccttgggtcccatgatgagtgtcgcatcttcggtgaagctctggacatatttctcgtgcagggactcggtgtcgctagtgcggtaaaagtcttccatgaatgcgacgaacgcggcgccgcggggtggtgcccgggcagtgtcgtaggcgatttggtaagacattatggatttgtcagttagggagaaatatttgcaagttgagaagaataatgagagatcccgcagaatatgtctattctatcatgaggggaaagtatcggaagggacgcatcctgtggcaagtaagcttggtggggaagatgatgatattatgaaccccttgttgggggtgctaactagctaactatgactaagctgtgacaatatgccgggtctcaaaaaatctcggcctccggctgagaaaaaaaggaaatttcaataaaaaataagaataaaaaatgataagaaaacgaaaaacgccgtcagttgtcgcaggcccggggcggagtatagatgtccgagggcgtgaattcacgcccggggtcgtacggtggcccctcggtggccacttcgagaggagcttcgcagtggttgccacgttctttatcgcctagtagtaacgggctctctagttgggcttggttgttaggagcagcgctttattaaagttggcaggggcggtggaacaggttttcccagcgtctgatggctcggcgctgaatatccgggaaactgctgagcgtgttcgagattgtcataagggtgccagcggcaacggcttcggtcttctcggtcagagcggcctcttggagttacagctggcgatatctagccatgtgttcgcgtaacctttttaaatcctcgatctctggctgtacccggtccatatgctccattatgcctttatagggaaggatgaaatcgcggaggatcttttcctcggtatcagctcggcacagttggctttgcacggctggcaattggctctgaggttcaggaatgtccggtgaagagaacggagcggaagagctgacgctgatcgcgtcgccaggttggtcctgcgtggtgggctggcattcttgctgagtaccgtgactagaccaagttggacgatttgtattctggtatgagcgttgaactgggtccatgatcttcatctttttcaggtccattcgggagaaagtaaaagacagcacttcagccgagcatgaaggagaccacgtggagaattcccagaaaaaaccataggagggtcttagtccttgtaggagcatagcgacgtggtggtgattgtctgagccgatgtccagcatctttgagttcgtttcagctttccagagcgtggtatactgaccgtggtggttatgcaattggcgtaccacagaacgggggtacggaaattcggcttgttcttcagcgtggcgggcttggaataccgctgctgggtcagtaactgcatcctctgcgaaaggataacctaggacgataggtccgattgtgaaaaccgggttttcgattttaagctttgaatctgccttcgggaccatcaggtagccgtattttgcggctgcacgaaggccaacgaacgcatagtaacgtttccagattggcgcgcatgggagtccatggaagtcgattcgtgggccggggtcctgtggtatcctgctagcacgtggttcaccgttggcgtcccagacggcacggaactcggcgcgcttcttctgagacagttccttcatcgctgcgtaaacaagctcgtcgcttagcagaacgttgcggtcgtcaggtagcaccagccttccttttgggtcgcgctcgtatctcacgtataagggcaaccgagcgatgtcttgtggagatagtctactgcctgtgataactgggacccagtcactggtccagattggcctatccagttccagttcagtgcgagcggcatcacgagattgtgtcatgcaggaatcgtcgaacgcgcatcccggaaggcaaagcatatcagtcgctccctgcgacggaccaaggcacgggagtgcctttcttttcggcataatgagtctggtgtgtaagaaagagaatggttaatgtgaaaaaagaagcaatggaggtaggaaaaatggaacaggtacgtcgagcagcaagtaacagtcgaatgagagtcagaaactcaaatcggagtaaaagtaggagtcggaagtaagagtcaagtgacgtgaggtagtgagaatggatagtaataaaagtaaaaggaaagtaaaaataaagcgaggaaaacgtggtacttaggagctcgccgggggtacgccctgacgctcctcgaagtctttgatagcctcgtcacatccgatgcagtcctcttcccgcacccaacagtcgtccctagctgattggcctttccagcggatcagatacttagtgatttgacgcctagtaccgtcgtgacggggtcgaccaggcgcgttgacgacgcgcttggcaagaatgcggtcgacctcgtagacgatatcttcggggaaacgctcgtctgtagtcgggtggtgttcgtcatctggttggcgctcccaggggtcgtcaccgtccggggcgggttctaggtgtgcgacactgatgactgggtggattcttgactcagttggaatattcaaacgataagcaagcttcccgacgcgttcgagtacttcgaaacgcccgacgtaacgctgtcgtagtcgccttggtaaaacttggttcaacggtgtgtcgtatccgtgtcccagcttaagatagactttgtcaccgacattgaaaaaaatctgcctgtgatagcggtcgtattggcgtttcatacgcatggcagcccaagcggcagaatgctcggcatctgcacgcgcggcgatgtcgggagctgtggcttggcgtaaaagcgaccaagggtggcgtagttcgacaccgtataagagtttgtgaggtgagtgacctgtcgttacgctgactgagctgtttagcgcagcttggagggcgggtaataggtttggccaatcttcgtcggggtgagtggcgattgcgtgccgtacagcaacttcggctgtctggttagtacgttccgactgaccgtcagtttgtgggtgataggcggtagtaaaaaacaacttggtgtagatgaggtcgaaaagtgctttccagaggccctgcgtgaacttggggtcgcgatcgctgataatcactgtaggaatcccccaattggctgtccaccagaaagagagagcacccagcgcccaatcttcaccgtcccagtctgcgcagccaggtatcattcccatcaacttggtgaacttgtcggtcatagtcatggccgcgtcatatccgtcggtcgaaatgggcatcgcgacgattagatctaaagtgatagtgtgaaagggtatcggcagggcgatgatcggttggagagaaccgtacgggcgatgacggcggatcctgtgctccaaacagatagggcaatgttcaatgtactgctttaggagcttggcgcctttgtagaatgtgataccgcgaagcttatgccaagctctgtcgaaaccctggtgcatctgctcgtcatgaaccaagttgaaaatttcctgagtcatggatcggggcagacacagactctcctcgccgttagaatttgtgaaaatgatcaagccattctccaggtggtagggtaacttctcaacttggggatcctgctgggcgtcaacgctttctagagtgtcgatcagggctgaccagcgagtgtctgactggtatcctcgcaagatgcgatccttagtgtcgtcgcttagctggagcaccgatgctgtaaggaggtacgctgtgggttggtctgctgtaggttgtttaaatannnnnnnnnnnnnnnnnnnnnnnnnnnnnnnnnnnnnnnnnnnnnnnnnnnnnnnnnnnnnnnnnnnnnnnnnnnnnnnnnnnnnnnnnnnnnnnnnnnnnnnnnnnnnnnnnnnnnnnnnnnnnnnnnnnnnnnnnnnnnnnnnnnnnnnnnnnnnnnnnnnnnnnnnnnnnnnnnnnnnnnnnnnnnnnnnnnnnnnnnnnnnnnnnnnnnnnnnnnnnnnnnnnnnnnnnnnnnnnnnnnnnnnnnnnnnnnnnnnnnnnnnnnnnnnnnnnnnnnnnnnnnnnnnnnnnnnnnnnnnnnnnnnnnnnnnnnnnnnnnnnnnnnnnnnnnnnnnnnnnnnnnnnnnnnnnnnnnnnnnnnnnnnnnnnnnnnnnnnnnnnnnnnnnnnnnnnnnnnnnnnnnnnnnnnnnnnnnnnnnnnnnnnnnnnnnnnnnnnnnnnnnnnnnnnnnnnnnnnnnnnnnnnnnnnnnnnnnnnnnnnnnnnnnnnnnnnnnnnnnnnnnnnnnnnnnnnnnnnnnnnnnnnnnnnnnnnnnnnnnnnnnnnnnnnnnnnnnnnnnnnnnnnnnnnnnnnnnnnnnnnnnnnnnnnnnnnnnnnnnnnnnnnnnnnnnnnnnnnnnnnnnnnnnnnnnnnnnnnnnnnnnnnnnnnnnnnnnnnnnnnnnnnnnnnnnnnnnnnnnnnnnnnnnnnnnnnnnnnnnnnnnnnnnnnnnnnnnnnnnnnnnnnnnnnnnnnnnnnnnnnnnnnnnnnnnnnnnnnnnnnnnnnnnnnnnnnnnnnnnnnnnnnnnnnnnnnnnnnnnnnnnnnnnnnnnnnnnnnnnnnnnnnnnnnnnnnnnnnnnnnnnnnnnnnnnnnnnnnnnnnnnnnnnnnnnnnnnnnnnnnnnnnnnnnnnnnnnnnnnnnnnnnnnnnnnnnnnnnnnnnnnnnnnnnnnnnnnnnnnnnnnnnnnnnnnnnnnnnnnnnnnnnnnnnnnnnnnnnnnnnnnnnnnnnnnnnnnnnnnnnnnnnnnnnnnnnnnnnnnnnnnnnnnnnnnnnnnnnnnnnnnnnnnnnnnnnnnnnnnnnnnnnnnnnnnnnnnnnnnnnnnnnnnnnnnnnnnnnnnnnnnnnnnnnnnnnnnnnnnnnnnnnnnnnnnnnnnnnnnnnnnnnnnnnnnnnnnnnnnnnnnnnnnnnnnnnnnnnnnnnnnnnnnnnnnnnnnnnnnnnnnnnnnnnnnnnnnnnnnnnnnnnnnnnnnnnnnnnnnnnnnnnnnnnnnnnnnnnnnnnnnnnnnnnnnnnnnnnnnnnnnnnnnnnnnnnnnnnnnnnnnnnnnnnnnnnnnnnnnnnnnnnnnnnnnnnnnnnnnnnnnnnnnnnnnnnnnnnnnnnnnnnnnnnnnnnnnnnnnnnnnnnnnnnnnnnnnnnnnnnnnnnnnnnnnnnnnnnnnnnnnnnnnnnnnnnnnnnnnnnnnnnnnnnnnnnnnnnnnnnnnnnnnnnnnnnnnnnnnnnnnnnnnnnnnnnnnnnnnnnnnnnnnnnnnnnnnnnnnnnnnnnnnnnnnnnnnnnnnnnnnnnnnnnnnnnnnnnnnnnnnnnnnnnnnnnnnnnnnnnnnnnnnnnnnnnnnnnnnnnnnnnnnnnnnnnnnnnnnnnnnnnnnnnnnnnnnnnnnnnnnnnnnnnnnnnnnnnnnnnnnnnnnnnnnnnnnnnnnnnnnnnnnnnnnnnnnnnnnnnnnnnnnnnnnnnnnnnnnnnnnnnnnnnnnnnnnnnnnnnnnnnnnnnnnnnnnnnnnnnnnnnnnnnnnnnnnnnnnnnnnnnnnnnnnnnnnnnnnnnnnnnnnnnnnnnnnnnnnnnnnnnnnnnnnnnnnnnnnnnnnnnnnnnnnnnnnnnnnnnnnnnnnnnnnnnnnnnnnnnnnnnnnnnnnnnnnnnnnnnnnnnnnnnnnnnnnnnnnnnnnnnnnnnnnnnnnnnnnnnnnnnnnnnnnnnnnnnnnnnnnnnnnnnnnnnnnnnnnnnnnnnnnnnnnnnnnnnnnnnnnnnnnnnnnnnnnnnnnnnnnnnnnnnnnnnnnnnnnnnnnnnnnnnnnnnnnnnnnnnnnnnnnnnnnnnnnnnnnnnnnnnnnnnnnnnnnnnnnnnnnnnnnnnnnnnnnnnnnnnnnnnnnnnnnnnnnnnnnnnnnnnnnnnnnnnnnnnnnnnnnnnnnnnnnnnnnnnnnnnnnnnnnnnnnnnnnnnnnnnnnnnnnnnnnnnnnnnnnnnnnnnnnnnnnnnnnnnnnnnnnnnnnnnnnnnnnnnnnnnnnnnnnnnnnnnnnnnnnnnnnnnnnnnnnnnnnnnnnnnnnnnnnnnnnnnnnnnnnnnnnnnnnnnnnnnnnnnnnnnnnnnnnnnnnnnnnnnnnnnnnnnnnnnnnnnnnnnnnnnnnnnnnnnnnnnnnnnnnnnnnnnnnnnnnnnnnnnnnnnnnnnnnnnnnnnnnnnnnnnnnnnnnnnnnnnnnnnnnnnnnnnnnnnnnnnnnnnnnnnnnnnnnnnnnnnnnnnnnnnnnnnnnnnnnnnnnnnnnnnnnnnnnnnnnnnnnnnnnnnnnnnnnnnnnnnnnnnnnnnnnnnnnnnnnnnnnnnnnnnnnnnnnnnnnnnnnnnnnnnnnnnnnnnnnnnnnnnnnnnnnnnnnnnnnnnnnnnnnnnnnnnnnnnnnnnnnnnnnnnnnnnnnnnnnnnnnnnnnnnnnnnnnnnnnnnnnnnnnnnnnnnnnnnnnnnnnnnnnnnnnnnnnnnnnnnnnnnnnnnnnnnnnnnnnnnnnnnnnnnnnnnnnnnnnnnnnnnnnnnnnnnnnnnnnnnnnnnnnnnnnnnnnnnnnnnnnnnnnnnnnnnnnnnnnnnnnnnnnnnnnnnnnnnnnnnnnnnnnnnnnnnnnnnnnnnnnnnnnnnnnnnnnnnnnnnnnnnnnnnnnnnnnnnnnnnnnnnnnnnnnnnnnnnnnnnnnnnnnnnnnnnnnnnnnnnnnnnnnnnnnnnnnnnnnnnnnnnnnnnnnnnnnnnnnnnnnnnnnnnnnnnnnnnnnnnnnnnnnnnnnnnnnnnnnnnnnnnnnnnnnnnnnnnnnnnnnnnnnnnnnnnnnnnnnnnnnnnnnnnnnnnnnnnnnnnnnnnnnnnnnnnnnnnnnnnnnnnnnnnnnnnnnnnnnnnnnnnnnnnnnnnnnnnnnnnnnnnnnnnnnnnnnnnnnnnnnnnnnnnnnnnnnnnnnnnnnnnnnnnnnnnnnnnnnnnnnnnnnnnnnnnnnnnnnnnnnnnnnnnnnnnnnnnnnnnnnnnnnnnnnnnnnnnnnnnnnnnnnnnnnnnnnnnnnnnnnnnnnnnnnnnnnnnnnnnnnnnnnnnnnnnnnnnnnnnnnnnnnnnnnnnnnnnnnnnnnnnnnnnnnnnnnnnnnnnnnnnnnnnnnnnnnnnnnnnnnnnnnnnnnnnnnnnnnnnnnnnnnnnnnnnnnnnnnnnnnnnnnnnnnnnnnnnnnnnnnnnnnnnnnnnnnnnnnnnnnnnnnnnnnnnnnnnnnnnnnnnnnnnnnnnnnnnnnnnnnnnnnnnnnnnnnnnnnnnnnnnnnnnnnnnnnnnnnnnnnnnnnnnnnnnnnnnnnnnnnnnnnnnnnnnnnnnnnnnnnnnnnnnnnnnnnnnnnnnnnnnnnnnnnnnnnnnnnnnnnnnnnnnnnnnnnnnnnnnnnnnnnnnnnnnnnnnnnnnnnnnnnnnnnnnnnnnnnnnnnnnnnnnnnnnnnnnnnnnnnnnnnnnnnnnnnnnnnnnnnnnnnnnnnnnnnnnnnnnnnnnnnnnnnnnnnnnnnnnnnnnnnnnnnnnnnnnnnnnnnnnnnnnnnnnnnnnnnnnnnnnnnnnnnnnnnnnnnnnnnnnnnnnnnnnnnnnnnnnnnnnnnnnnnnnnnnnnnnnnnnnnnnnnnnnnnnnnnnnnnnnnnnnnnnnnnnnnnnnnnnnnnnnnnnnnnnnnnnnnnnnnnnnnnnnnnnnnnnnnnnnnnnnnnnnnnnnnnnnnnnnnnnnnnnnnnnnnnnnnnnnnnnnnnnnnnnnnnnnnnnnnnnnnnnnnnnnnnnnnnnnnnnnnnnnnnnnnnnnnnnnnnnnnnnnnnnnnnnnnnnnnnnnnnnnnnnnnnnnnnnnnnnnnnnnnnnnnnnnnnnnnnnnnnnnnnnnnnnnnnnnnnnnnnnnnnnnnnnnnnnnnnnnnnnnnnnnnnnnnnnnnnnnnnnnnnnnnnnnnnnnnnnnnnnnnnnnnnnnnnnnnnnnnnnnnnnnnnnnnnnnnnnnnnnnnnnnnnnnnnnnnnnnnnnnnnnnnnnnnnnnnnnnnnnnnnnnnnnnnnnnnnnnnnnnnnnnnnnnnnnnnnnnnnnnnnnnnnnnnnnnnnnnnnnnnnnnnnnnnnnnnnnnnnnnnnnnnnnnnnnnnnnnnnnnnnnnnnnnnnnnnnnnnnnnnnnnnnnnnnnnnnnnnnnnnnnnnnnnnnnnnnnnnnnnnnnnnnnnnnnnnnnnnnnnnnnnnnnnnnnnnnnnnnnnnnnnnnnnnnnnnnnnnnnnnnnnnnnnnnnnnnnnnnnnnnnnnnnnnnnnnnnnnnnnnnnnnnnnnnnnnnnnnnnnnnnnnnnnnnnnnnnnnnnnnnnnnnnnnnnnnnnnnnnnnnnnnnnnnnnnnnnnnnnnnnnnnnnnnnnnnnnnnnnnnnnnnnnnnnnnnnnnnnnnnnnnnnnnnnnnnnnnnnnnnnnnnnnnnnnnnnnnnnnnnnnnnnnnnnnnnnnnnnnnnnnnnnnnnnnnnnnnnnnnnnnnnnnnnnnnnnnnnnnnnnnnnnnnnnnnnnnnnnnnnnnnnnnnnnnnnnnnnnnnnnnnnnnnnnnnnnnnnnnnnnnnnnnnnnnnnnnnnnnnnnnnnnnnnnnnnnnnnnnnnnnnnnnnnnnnnnnnnnnnnnnnnnnnnnnnnnnnnnnnnnnnnnnnnnnnnnnnnnnnnnnnnnnnnnnnnnnnnnnnnnnnnnnnnnnnnnnnnnnnnnnnnnnnnnnnnnnnnnnnnnnnnnnnnnnnnnnnnnnnnnnnnnnnnnnnnnnnnnnnnnnnnnnnnnnnnnnnnnnnnnnnnnnnnnnnnnnnnnnnnnnnnnnnnnnnnnnnnnnnnnnnnnnnnnnnngatcctgtactctaaatagatagggcaatgttcaatgtactgctttaggagcttggcgcctttgtagaatgtgataccgcgaagcttatgccaagctctgtcgaaaccctggtgcatctgctcgtcatgaaccaagttgaaaatttcctgagtcatggatcggggcagacacagactctcctcgccgttagaatttgtgaaaatgatcaagccattctccaggtggtagggtaacttcttaacttggggatcctgctgggcgtcaacgctttctagagtgtcgattagggctgaccagcgagtgtctgactggtatcctcgtaagatgcgatccttagtgtcgtcgcttagctggagcaccgatgctgtaaggaggtacgctgtgggttggtctgctgtaggttgttcaaacacatacggcgctgggatatcctcgagatcgtcttgcgtgccggggactgacgggtccgtacatggcaggcgggaaagagcgtcagcgatcttattagtttttcctggtctatggaagacgcgtaggcgaaactgttggatgaactgggacgcacggactaggcgaagattttggcgttctaaagaaatagaactcaagtttgtcgctttagcaatacccacagtgctactatggtcggtgtataccacagccggaaggtcgctaggacaggcctctaccaagtggcgcaccttgcggagggtccagcagagggcggaaacctcgagctcagtgggccagtaattcttctccgcgtctgtaagaagtcggctgaggaacatgatcggctggatctctgtagcagggggtggttttgaaacgtccttatgagtgaacgtcgtcttcgtatgatagattgtggcaccgtgccctgtttcctttgaaccgtcggtatcgatgtagagctggcgtgtgggatcatggtgtgctagccatttaggttcgtggaactcggcctggagtagacgaaaactctcgagctcagcttgggagggttcattgagaatggcttgcgcgctccacgctcggcgctgggggcctttgatcgggctccctttcagcaagtttgtcttgcggacttggagtggttccgatttctgtgcgtagcttttgatataatggcgaagatcacccgtcattccaaggtatgtttccagctgcttacatgtgcgcggaaaaaccagtgaggttatcgcctttaccttctcggcggttgttgacatgcctgcggagtcaatgtccttgcctagcagggtcaaacttggaaacccaatacgcgctttcttcgggtccagagtgatattgaattcctccagttttgcgaacagtaggtggagtttagcaacatgctcgtcaagcgtatcgccgaccgcgaagatatcatcgacgtaggttcgacaccattctcgaaacgcgcggagtatattgtccatctggcgttgtacgtaggcgatggagtttgaattgcccatggcaacgacgtggagaacttcttgaccgcggtgcgatatgacagcttggtggccataatagtcggggtggatgcgccattgatagaagaattttgccgcgtccacgattgtgatgaaacgcttgccttttgccaaagcaataatctcgtcttgtcctggcaatgggtataggtctggaaccaagttcttatttgtcgggcggttgtcgaccacggcgcgaccgacccgttggagcttggcgttacccttgtcgtctgtgcgagtgacccatttccatacaacaaaaacagggttcacgccctgggcttggtgtttagcaaacgacatctttccttgagcatgtagagcatcgaatgcatcgtcgatgacttgttggctttctctcgcctgtctgtagacttgtgaacgctgtggctttgaaccagggactgttgggagtctcatccattcgtcttgtgggatgtccacaacgccggggttagaccaaatgttgtattgctcacaaacatcgcggagcactgcagctgtttcaggcgtcccatagattataatgccattaggtagtactgtttccagtggatgtcccggccgagcgtaggctgtagatgttggcaggaccttctgcatgtccggtgtgaaaacagtatcaggaagtctatcaggaagtctatctggcagccggggcaagttgtcaacagcggccagataggcagtgacagagtcgtgaacgtctcgattaatcaatggggggcggggctcgaccgcttggggctgcgatgccagaggcgtcacttcgggagaaacttcttggggctgcgatgccagaggcgtcacttcggtagaaacttggtaggcggatgtgaagtccggctctaaaagttggcctacacgatccttcttcctgatgacttgtgttcggtcggtgttgttaacggcgtgtatatatgcgaaaccggcgtcaaccatctgtgccggaatctcaaacttgctgttgcctggctcgaaaacgaagtcacgatccttcggtaaaatcgacttcacgacaatggggatccgtgccgcctggcgtggggggacctcgattttagaagaagcgtagaccggtcttttactcacgtggtgtggttttgcgcagagggcaataggaaaagtcaagttttcgcaggactcaatgatcgcctgggaacgcgggaaatcgagtataaacccttctggtcctagaacatccatgccgataagaagctgggcacggaggtcctcgacgacgtgggcctcgattcgtagctctgcggccgtatctttgttcaggaagtaaacttgaatcacgatgtagcggtcggacaggtgttgggaaccgatcccactcacaggaatcgggctgatagggtactgggggcattggagtgatgccgccagctttgaatcgatcaaagtcataacacatccggagtcgaggcagcaagtgtttagcttgctggggcttccaagtccgactgtggccgttgtatatcgccaggatcgaaatgtatagccggggacgtggtcggtctgtctggccgagtggatgatgcgatgagcgggattcgcgaaattagcgacagcttcagctggtatagcggcagcagcttgaggcttacagccgtcaagatgctgatacagcttggtgttcgacttgaaaacctgtaaacaggataaacaagtgactgagtactcgctgtcgactgtacatagctgggcctgtgccggcggatcggcctgggctcgaaaaccggattggtggtcgtcgtcccgtaggccggcagggtcagcgaaattcgcactgtacaggtcctcgtcggcgtaaaagtcgtccttaaaatcctattaattgttatcgttgactgggatgtcgtcctgatactcctctaggccattgttattagcttaggaatagtcatttaactgataatagttagtatctgtatccacgtggtatgcccgctgaggtttgttccaaacagcacgctgggagttcccggagccgttgcggccggaccattggcggccaggattgttccaggtctgctgagcttgaactccctgctgtggacgttgttgtctctgaaaggtttgggggccttggttgctttgtgctgggttctggggctgatactgatgggactgatattgggctcctgtggcttggtatgggcgctgaggagtctgctgagcctggccacggggcgctggagcctgttgttgtctatatccggcctggctttggggtagaccttgatagtcttgggctggcgagcggttgtagccgtacgggcgctgagggtagccttggcgctggtcttgtcggtgatatggggccgaattgtcctgtcgcggcctattgtttctaaacctggtagtcaactgactctggcgcttggttgccatatctttccagtcttgatagtggtggtcaaggctgttcatgaaagtgactaacgaggtagtctcagttggctctgggatgtcgcgacgaagcgtaggctctaggttctggcgaattcgtaataactggtcgagaacatctgtcgtacccgtagctttgcataggcgtaacataccctgcgcatattctcttggggtgcggcctcggcgtacgtcatcccattcgtatgtgtgcttgtcaagctggagaagggcctcggtacggttgggtctgaaacgccgcgtcatcatggaaaaccatccatcctggagcggaacctggttcataaggcgtttttcgtccgtggtcagctcctgcgaataccatcggagcgcgtcacctcgtaggcagctatggatgttcgctcggacaacagcttccgacttcaggagtattaggtctgtcatacgatctacaaacgtatgcacgtcggagtagacgcaaagattttggactgtgtccattccatccttaaaactcttcgaaggatcgaaaacgccaatttcggacgctttccacgaggtatcggtagtagccaattggcctggggaaccttgctcgccctggggaccttggttaccttgaggcccgcgaagagcgttggcattgttccgaaggcttgtctgtacggctttctcgataagctccgtaaactgtgccatatcgaaaccgggcaacggtggggaagcagccggagttggcgtgtcgcctgtgtggccgggaccctgatttccgttgttacggctgggacccggacctccgttatttgccatttttcgcgggaggtcagagagtttggcttcccgcagcaggctcgatagacctgctatggggctggcctcgctgtcgtaaaaacgtgaagttaatcgtactcttgactgtaccgggggtcgttccggggtcaggtgttcaatgccggcctcgtgagagtggaggtccgcttggtcgtcttcggcttgttcggttcccggagactggacttccgcctggtcgtcttccgcttgttggtcttccggagactggacttccgcttggtcgacttcggcttgttgagactggacttccgcttggttgacttcggcttgttggtcttccgaagactggacttccgcttggtcgccccgtagaaggtctgcgtggctgtccttagcctgtggtgcggaattttcgtcctcggttcggaaaaacttgctgtcgtaactgtctggccggggactgaaacgaggctgccgtcgtgtagtagcgggcctgtgcgcgtagcgtatgacagcagtagcttgggcagtcggtcggtccgaaatgggcgtcgaagactggggtgtggaaaggtgtatcacagcagcaggttgggcagtcggttggtccgatacagacgtcgaagattgaggtatggaagccggtgaactgggaggcttgctcgtagttcgcttaggtcggggtctcccgagcggacacgcaggctcgctcgacagaggggttataggacttggaacggcgaggtgagacgtcagacggaggaaatccttgacggccttgttgagtatagacctgtcgatgggccaggaaggtggaaatggatcctctgaagatggaaggatgacggaagtggatggcgaggttgagggattggcgggcccggcaggtgaaggggtcaggatgatgataacgcgggaaagtgtatctgcgtcgaaatcacctgactaggggcgtgcctcctagcgataattgtcgaactggattgcaagctgggtggcccgacgagtacgcttatccatggattgttatagtagcggctcggcactgtgatcgacagccttaccgtagcggcttggcactgtgatcgacagccttaccgtagcggcttggcactgtgatcgacagcgtggtcgaccgccgatcgtgccaggcttggtgacctctgaccttggcatataggggaacccctgaggtggtcgaacttgttaaaacaaacccgagagagatcctctcggaagaaaaaaaactctggatgaaaccaggacgtgctaccataaatgtggcaagtaagcttggtggggaagatgatgatattatgaaccccttgttgggggtgctaactagctaactatgactaagctgtgacacatccgatcttatcgaggaccgtataaagcgaagtttttctttctacttttttgtatggcctgatgagcataatattagacttacaacaaggcagatactgatacatgtgacgtcctgctggatctgaaaaactacatggcctgtatagtcctcgactcgtacgttgtacttcggaatagcatcggaagtggacatacccacaaatattagtcctgacagtcacctatttagggatttatatactttattttctaagttcaaaggagtccttgtcacatgggttcgatataccttattgtgtacaaaataaatgtcccttcaatacgaagtataatttgaccattttgcctgatatatattggttttctttttaaataatcttttgcaacatttgtatttgaagtttagaaaagaacccattcggaatcattgctagctgcattgggttgcaaagcagttttacattcgtagcgtcattgacaaacacatggctcatggtaatattgacaatctcgacagctttgtcgatgatgggctatgtatcaagctttcatcgttcctgttgagctcttgtgtgcatggaaaagaggagaaaagagatctgtcaatagcatagatgtttttagaggatgcctttacagttggcttatagttttcaccggtgccttcctgctcacatgtgttttgttcatcctgtcctcgttgatttattcctcgattatcattgtcataaacaatagtcttcttctctgtcctttatatgagacttctcaggcataatagtctactcctttgtctgggcaaagatatctttgaaccctttcaatttctgaggaccaaggatccgcttgccagagacttcgtagttccattgcaaaccgttggtcataaacctttacacatttccctcaatgtctagatcagaaaggtcagcatcaaacgaaatgaccatcagatataatatattccagggttcaaagtctctaacgattgtgatttggactaggcgaccctctagctccagtgtgctcttcttgccggccacatatgatatgagcatctaaaatgtcagactaaatcaaaatcaagaagctgcaaactgaccacctcagttagcctattcatatcagttctcagaggaataccgtgccaactatctaatgacgtctccctccaggataacaaaggattcttgaaatcaagggctgtacactgagtatctctcatgctaggtttctttgtcattccgaggggtagcactgaaacactgaaaggaaaagaagccgaaggaatccagaagtcatcgatccccttggaagtatcagcactatcagctttatagattgagaattcaacttcaaattagagtatgttatccatactgtttctcacaatgaaacttctacctgatagtatatactcttttaattgccaagtgaagttatcatcttagggaaagaacacaaaattttacgtgcatagtctgcttaggggcgataaaactatattttgtttgttatagagatgacaagccactacacccgaggttgaaggtgagccttgagaaagattatagtcaaacttgtgaccttagggtgaagatcccctaatcatccgatcataggattttaaccacatcttcttcaatgtagatcactaggaaatcaagcttgtgtgtaaaaccaaaacaatgtgtacatggcggtgaaaacatctggaatcccccgcctaccaaggttctaagacccagtgtatacaacgacatctcacggatagcacccaagatttcgattctccatactagcacagtcatggccgactcaacgagatcaaaagacagtttaccacctcctccacctccgcctcccccagagaaccctcgctcaaaaatatcccccacagtcctaaagatgcgaagcacatctcccagccacttctttcagccccaagtccgccgatctcaaaaccaagggcctgctccaacaggcccatacttcttctacggctcactccaagaccaaaatctactcatagagctgttagacctaagccacgccccccacctacgacccgcgtacatcgagggctacaagtgtaagctttggggacactacccagccttgctctctggtgatcccgtggatactgtcacgggtgcagtgtacgaggtacttagagttgatgacgcgaagaaactagcggcttacgaggggcctagctacacgactgttgcttgctcaatccggtatgcggatggcgaatctccaatacaggcagaggggtatgcgtttctctttgtggggaatacgcgtgatttaagtgagggatcttttgatttcaagctttggttagagaggagggcattgggaaggaagagctgaggaagatagtggcgcggggtgggctcatacttcggagtccgaaacgggaagttatagactgtacgataatacagcgagtcaaaaaacatcagtttctctgcttatctatgttagtctgagtcagatggactggatattgtactgttgtaagcaacaatcccaaggaagcatgaccaaaatagagtatgtgcagaatcaagttgatgaacatcgcggggtaaacagggtaagcgacagagaccgaccaaggcacagacaactcggagaccaacagaggggcaagtagaagtagaatcctcggctgcagcacgattgaggggtaacaatcgtacagaatggtagaatgatatagaaggtgacatgcagggctaagtcgtcacccgcatctacttcccgcacaataggggggaaccttggaagggaattgatgtccgaatcgagaacacccgcaatgcctaacacacagaccctgataaacaagtcaacaagaggacaagcgcacaggtggcttgtatgtcgtacatggacctcgcactaggtgcattcctcgggtgtattcacacggcaacaggggctacttccaaggcaggtgtcaactatgcaggatttgcattctaagatgacgatgcgaatgtggacagcatagtttggagtctagtttcaattaggtacaatatatacatgctccttagcatacaacaagtatatacggagtatggagtacggagtataggaataatagaaagccaaattccaagaatgtcaccgataccagtgacgtcaagggaccagcccagattatagtgggacccgagggagagtggatgtaccggtacctagtacacacatatcatactcgatgttggatgctgccgggttcagctgactgacgcgggggcaaatggagattaggaggtcacagccatgcgaataagaatgacatgtacatcatgagttccaaggaccgtgggaaggattgaggtcgatgatccacgtgccctgaatgacggttatcagccgatgatagggaaaactagggttacgccctggagcgctgcaagcgttcattaaaagcgcacgagcactcaggatcaccatgactggccgataacgacttggcatgaggggtttatttcgttattactcaggtatcttaggggggtacggggtaagggaagtatttccttgtatgaataagaatgacatggagagatggtgtatgaggtattcatcttaagatagagactagagtaatgtataaataggtgtaatagtgatagttaatagctaattgttaagttaatactttaatagtactccgtataactactcctatactcctataatagggagagccggatgcacccggtgtcccacgaggcgccaatcaattcacccacgcgctttcccaatttcatactgggggggttaagtacaaaggtccaagtcactggccaagtcacactttcaacttatatttccccttcctcgactactcccccccctgttggactggacaactcttcgaccttttcttggaatccgctcttatcgcgactatctgtctccccttgccgcgcatcccctacgtggatccaagccctaaacaaagttggccccaacttcgctacacggctacacggctacagtgtctccttggtcgcggtgtgaaaggtgagttcctttgttttgacttcttgggctctttcactctgaaaccatcctgttgccacctgatctttccatggtacctttgtttgagaccgtcttctgactcatatactctggctcgcgcgctttaggttcttctcctttcacaaatccatcttctcttcatcatggctttccagacaaactccagcattgcaatggctcttgctggcaagactgcctccgttgatatccctcagcgccgctctggtctgagtggcggccgtgtccctacgcgtcccggacagcctgcgatgctgcccacgccacctaactctatatccccgaccctccctcctcagaccttcaagcaccgcgcgacactgtcgccaggatcgccgctggccaccgtcccccagttggactccgatatcgatctggaggatgcggaacatgacaacagtcatcacgtctccctgcctgtcgaggacctcgacagtactggcgcgatcacccctgtcatgcttgcgaagtatcatctccctgagatcttgctgcaccaggggcccttggctatccgccacgttatgggtcatctgacgacttccgtccctggcttttcgcatatcccccctgccaaggcgcgccgactggttgttgcggcgttggagggtcgaggaaatggaggtgtccaaggcgacgtggtgttcgagaaggttggttggggccgctgggacgcgcgacgtcgtggtgaacctgctcacgatcgggatttgaacgatccgtcgtctcctccctcaagtgttgcaggctcgttccagcagcgtggcctgcagattcagggccagtcgggtcggcagggtggcaatcatcatccctaccgcatgagctttgccgaatccacggcattctcgtacaccgacgattatggcatgcatggagacctcgatatgttagaacacgaggccgataagatgtctctcgatggcgacgacggcgaatactgctcttcctccgaagctcccgacgagatgcaagaaaccgagtgggtcgaaggcgatgacactgatgaggaagactgggcacaaattggcgccgacgctttgcgcgcccgttcgatgaacaacaacggcggtttcatcaacggccatgtcgctgcgcgcgcaaagcctcaaccttccgggattttccccgccacctgtccatctgtggctaagttgccaccccgcacctttgacatccaggaacgcgccgctgtggaggcgctcctctgcctgggctccatgtaaagcccctcatcataatcggcgttatatttatttctactctttgcgcgatacacttctttcacattcaaggccgtcgaagctggtctggaccgcttttggcgttccatggtttttcggcaaatatccaaaaaagtcaaaagccaggaaatttggctagcttgcagtgcaactacctcgattgatgggcgttgggttggacctttgtggtattgggtttccaagatggcgttcaagtctgcaccttcctcttatgcctgctacgaaacacattgtcatgacgattcagggtggcagtttcgtcgctgctaccactatgacaactccaaataccccttatcttctccgctctgctacttttacgtgggttggctcagtattattgtctgtcacctactcattctggcgtttatccttgcattagttgagtcagctaccactgcttcaagactcctatgtttcttttttcatccttcgaccttttttaatactctactttgtctttttttttatatatcagcttgcacctcccgatcacttggaagatctcagccatctggaggttctggtcgtctttattgatcgcactggctcttctgacttggatggaatctcagtcatcttcactgatccaactgagaagttgtcctcttcctctgccctgtttctctctctatatatatttatgtttatctttatgtgctctacacataatctgttgtacattgcagattcatcatccttgcattaccctggaggttttggcttcagttctcgaggctgaatactttacgcggatgaaagtacataatcacttagctagtttagaaacttaacgcgtcgcatatcctgcgcagttcagttgccatttttctctttcatttgtaatctaagtgttcatggtatgtacttatactcatcccaagaccttacaacgtcgtagatgtaggctgctgcctgcatgtcctcacacttgagcccaagtatcagagctttaccaggaagaacgtagtcagaactacactccagcgccactactcaatttcaagatgcaagtccaaccaaagcattggtattaaagatatcattcaaactaaactccaagtacaattcccaagtccataacccaattcaaaactgccatcaacacatgcaaatcctcctccagaacccccataataagacagactccaacctaacccgtccatcccctaatcatgaatatcattaatcttcttccaaacccccttctcaacctccgccaacttactcccagaccacctcatccaccacttcgccgtaccgacgaacccctcctcctcttcggggaagatactactcgccccgccacctgacccagctccagacccagcaccagcaccgtagtgcagcggcagagtctgcgtctgcgatcccgcgtgcgtctggtacacagacgaataaggcgtggaggttgagttcggagtaggctgcggcgggttgtaggagtatgactgcgggtagtttggctgcgttggctgggctgtctgggttggctgggctgttggtggaggcggttgggggatggcttcgccggctttgggaggaggagggactagagaggaagatgctgttcctggtcctgtgtatgctgttcctggtgatgggcgcgcgccaggttggggtgcgggtggattctgggttgtggatgtcgcggtctccgggaaggaggttgttggtgttggttcaagcgcggttgttgctgttgatgttgctgttggggttggctgtactgctgttgcgcctggttggggtggtgctggtggctgggtggttgtgtagattggaggatttgagggagctgtggctgttgctgttgttgttgcgggtgctggtagaggttgggagggtgcgcttgctagtgactcgattgctgtggcgggttcgggctgcgaggttgttgcgtgcgtgccttcctcctccttgttggagttcacgggcgcggagttgtaggtttggatacctgttggggcggacattttagaggttgatgtacttattgttctgggaggcttaggtaggggagtgaaggagctttgtagcttcaaggagcttagacgtcatgggtattgccgctgtggagcttcgccgcattgggacacctctcttttctttcttttttttttgtctacctacggttcagtcaagtattccgatgacaaaaattattggggctcgaatggttggctatttgcttgcgcttgtttcagttatgttcgcatagctagaagcatccagcatacaggcagccagccctcaattggttgatctatcaaaactaggccagcacaaagaacacgtccaaggtccgaagctagttggtatctgtatcttagtagaattatttatttactttcacaatgtttacgaagatcaagttgaaaaaacgaaaatagtttgctggcagtaaagtacattgggtacaaaaagggaagaattagaccattctatgcttcaagatccttcggacccatttcttgacgcatctatcttttgaccatcccatatcctcaaattccacgcccagtggttacactgggggaggtgaacaccccctgtttcagtataactacagtggcaagagactcacgtttcagtgaatcgcttagaacttctttccgaggaggaggagctgggccttgtcgtagatggacaggacaccggcaccggcgacaccacggaggatgttagcaccggcacccttgaagagagacttgaagccctccttggcgatgatctggcgggcagcatccatggagctggagtacttaacggcctcaccagaggtcatcatcatgcggcggcgaacggtgtcaagagggtaagaggcaacaccggcaccggtggtgacggtccagccgagcaggaaggaggcgatgaaggagccctcaagaggaccaacgaggagaacgggcttgatggaatcgtacattccgaagtagagaccacggtagacgacaattccgagaacggagggaccgaaaccacggtagagaccggcaataccgtcggaggcgagggtcttgcggtagacatccacgaggccgttgaactggcgctcaccggtacccttggaggacttggcgtcgttggccagacgggtacgggcgtagtccagggagtagacgaagaggagggaagtggcaccggcagcctagagggtttgttagctgtgagccgtgtgtgagagttttcagatacgtacaccaccggaggcaaggttgcccatcatccactttccgtatccatcacggtccttcttgtaggcgaacatggacttgtaggtgtcacggaaagcgaagttaagagcctgggtggggaagtaacggatgacgttggcagtgttaccacgccacaaggagacaacaccctcagcggcggaggtacggcggaagcagtcagcaatgccgttgtacttgcggtcgagacgaccctgcttgagcatctcatcctatttatcaaattggttagatactaaagtgatgaagatatcgagctgccgaatggcacgggccaagggagaaaatttttcacgagttgcgatcgatgcgaaaacacaactcatgtccaattcaatcacaatcaattgttgtgattctctgcctctggctcattccaatcggtgcatgacgggtggtaaccaacctggttctggatcaggagcttgacacgctcaatgggggcagcagcggtcttggagacagcggcggagacaccacccactaatacacagttagtatgaaaactcgagacgttgaagcaagcaattgctgataatggcagatatcaagcttgacacgtactcaggaagtcgacaacaaagccctgcaaattctgttagcacgactgctcggttcaattcacatcgagaaagcgatgaccgagccttgaaaccgcgtttcgaaacaagctcgatgattattgatggtggacatctcatcggtttgaatcttcacgcgacaacaaggccagctctcacgggtttgcagggaaacactcacgggcatgccgaagatcgacttctcggcctggttaacatcaccggaacccattttgaagatagtgcaaaagaaaccggatgcaaaaaaaaagagaggagatggaaagagtgtcaagaagaaagagacaccggggacaatgaagaagaaaaaggaagagagaaggcgggaaggggggccagaaaaaaaaatactcgaccgccgggcgctaaggcccaatcaggaagcccaggaggtttaattaccgtataatacggttatcatgtcggtactggtttgcctcctgccgatatctcccgatccactgaaaattctgcaatctggccaactggtctggacggtgctatgggcatataggggtctttgttggactgtcaaatggaccacacggttttggtctacaatacagctactccacagagtcacttttgtctctatccttgggaaatcagtcgatatcctatgttttcactgtgatcatcgacatcctgtagtcccgagcaacggcccaagcgtcggtgcattgtaccgtaggggtacggtgtatatttccctatccaatgccgggcctccacctcccggggcaacctcctttttgctggccgggtatccgatggcgaaccagacaaatgatatctcggacttgccaccgacgggattatttccttctagccctgtgttctggggcttttgaatgatttcgaacgtccccgggtgtgccatttgaattcaaacttgagcccaaacgacccgatattactagttgcggagggagtagcctttttcgtattcgggcgagtggattctccccaggtctcctctctacactatcttgttccttcagtacttacttcctgggaatatctaactatggcattgtagcataattcaacaacccaatagagcaaatgtgatccctctcaggtcttgcactgatacggagacgacactgtgatatgtgagggatccctagacttccacggttgatgagacatttttcctggctactatttttatgtcgcgggtacaaaccttaaggtgatagatcgccgcatggacgatgtacctaggtacttcacatgttaggcaatgctaggtacccaatagtacaacattggctccacctcccttggtcctcagtgaaattttctgtatggagcactacgtacgttcaacgcatttcaagctgcatagcaatatttggagcttcctatagcttaaaatcagatttcccgaggttcaccccagcaaccgctagcgcctgagtgggcccgcatcgcatgttagctttccgctttgggagctacggagtcctacaggtatgcatacgcctgaaaaccactagatttggagaaagtctttctcaatagaacttcaggatatgatgatagctgtaatatctctcacatttgaatgacaaactagaggcgcaatttgtgttctatattatagctttcagcgaatatatattccgagtactaccacatcgtatcaagcacgtgctaaccctgtatacttgcgttttttagcacttcgttcatttcgacacaatgattttcgaagttgagatactatcaagttaaagagaaaataattgggttcattccataaattgatttgaaaaaggtataaacaatggtagattgacagatgcaacaacttttaatgcttcttcgacctctttctcttcttacgtgtgccatctccttctctgatatcaaccttatcctcatccacagcatccttaggctgactaggttggacatcaccgccgaacttgaacaccggcccattctcgtcaccgaaagtgtccttgcgccactcgcgaagccgggccttcttgcctaacctcttctgatcgcgccgcttctgctcttcctcgcggaaggtggcgagcttcttcagaccagcgaacttgttgagctgtatgtcgtccgccatgaggatgtcccgtgccgtcaagccaaagctctgcggtgaggtttcgcggtagcggaactttgtggcgttcttctttgtagctccaggaagcaaggtgatgtcgagatccaggttgcgctcaaccgcatcgtcaatgcgaagacggtctttgcgggcctcacgtttctgaatccgcttctcttcggccttgctcttcttcttagatccggaagcctcgtcgtcatcttcgtcttcggcttctgatagttcgactgtgggtttcgcttcttcatcctcgtagtctgggaccaagtccttgatatcgatatcatcatcccaggtaggcttcttaggatgcttcttcttcttgcctccctcattttcgctgtcctcgccctcctccccggcgtagtactcctcaccaaaccgtttttgcatctccgcttcccagtttgagtcgtcccaggaagcatccaggaaacgagaccagtcgtcgtccgtgaattctgaggcacgaagtcctgcaacttccttgatttgctccacctttttctgtagttcttctgtcttcagtttgcgaagacgattcttctcagtttcgcgttgctttttctcctcatccttgagtgcgcgctcagcgtcgcggatcttcttacgggaactcttctcttcgcgacggacggattgcttgttggtgagatcacgagagtgtgtgactatcacctcgttcatcttgttggggtcttcaaatcggaagttgtacgcttcttcaatagcttccgcccgatcgacgtcgtcgtcctcatccgaatcgaacggatgcaactctggcctgtcggtggggatccaggctcgtgctgacaagaagttggacaggaaagtctcggggtctttgtccgcattctcgatatcgagtttgatttcagatttaggcaacgaaatgtcctggccgggcttgcggaccatgaactcgtcggcatcttccatctcttcgtcagacttgtctgccgctccgtgcatctccttgacaatagcattcttcaagtcggcttgctcttgggcataggtccttggggtattttcctcctcagctgggttgacaccactcagaagattttcggtatggtattgtcgcagcgtcatggacttttccttggggccctttccggcggcggcttcctctgggtcgtacttgctgtaaaagctggcatctttgtcgtaaacgcgaggatccttcgaacgaatagcattcaaagtcgccgaaatttcagcatccagagctactgtagcgagctctgcattgtcgtcctcttcttcggagtcggaatcctcagagtcttcgtctgggcggtttccaagactggaggacttgccatacttcgcttccactgtggattaagccaatattagcacatgctagagcgcaaacatttcgagtgtaagcacgtacacctcgcaacttcttctctcttcttgttgtgttcaaatcgacgagcgtaatcttcattgatcgtgaacccggtatcagacgactgcttgccgaggagaactccaccagcatcgtccccagagtcactatcgctatcttgatctaagagctttcgcattttcttagaaggaggctccattttgtgtgatcaggtatgtgattgaagaccgactcggcgaaacccccaattggcagaaagaaaaaaaaacctcacaccgctctccacattaaaaccctcgagaatcaggcaccaaggcagaaacccaatccttgacgtagccaattagatcatcggggggctcatctgaacaggtctgaggaggtctcaggcaaagccgagaccgctacaagccagaaaatcatacacgtgggttctctccagggcttggaagttgaattgatcaccaagtggcatgaacgagaggaggcctattcacacctctcgcgtctcggtctttactcgcgttaagtgtatggccggagacatgcactagatgtcgactcaagcacaaaccccgttaccccaagttgggaaacttgtgagcgttgtgtgagtatctcatatgcctgatattggaattctcgttcttgtatactaatgcatgcgccccttttcagcccggtcggtctcaaagaagccgctctcgactcgcccacctttcgtgccaccaccctttatttctctgatcagatcgatttcatagagaaatggctcgacggatatgccaaagctgcaaccaagctctcctacgagctgaccgctatggagagtgtagtgaacaactttctttcctactcgacacatcccctcgtggtctcggaagcggtcgttgaccatgattacacacttttggctatgaggagatgtggtgaggggtctaaagatctttggagtggactcatcgcaacaaccagaaagttggagtcgttgatttccgaacctattcgagatttcattcaagaggatctgcggcagttcaaggtattaagaagcccctcatccaatttgttctcggattatctgacacgtccataggaaattcgccgcaacctcgagcaatcacagaaacagtacgattacctccaagctcgatatgcctctcagtcgaagtccaaggaggcctcggccctgagagaagaagcatttcagctgcacgaagcccacaaggcctacctgaaagcatcaatggactattcagtacagggtcctcaggtacgaaatgcactggaccgacttctggtcaaaatctcctgcgatcaatggagggaattccggggatttcacaatcacaacagcgggaccttctcgaaatggtcgcgtgagatggatcgtattaagggttgggttaatgagatggaaggcagtgagaaatcatccaaacgagagctgctagccacccggaagctcattgaggaagccgcggagtttgcggctcgaccttctcgtgaactggaggactacaatatttcgaccgttccgtaccttggctctcgtcctatttcggcacttaatgtgagcaaagagatgagaccagagaagcaaggatggctgtatttgcgcacattgtcaggaaagcctactcgcacaatttgggtcaaacggtgggcttttctcaagcacggcatatttggatgtcttgtacagggctctcgtactggcggtgttgaagagagtgaaagaattggtgtattgctttgcagtatccgtcctgcatcacaggaggaacgccggttctgcttccaagtgaagaccaagaacaacaccattctacttcaggcagataaccagaaggagctgatggaatggattggtgccttcgaggcggccaaacaaaaagcactggagaaccccgcaagcactgatctctcggtttctggaaaagtcacagttcaagaccctgcattttcaatttctcaacccccggctgcggagttcgctgcggatcctgctgactctcttacccctcatacgaacgatgagtccggagcgggggatcgcagtatgacgcttcctgttccagaccgtgatggatataccatgagaaatagtaccgatattggaagcagcagaagaccaacaggcttcgatagtgagagctctgcaagagaacatgcaaaagagcatacctctagactcatccaaaagttggatcttcaccgcaaatcgaacaatgcggctccactatctccttccgtccccggccctgcaggtggaatagccagtctcatctctgccagccacaatattctcccttacagcaacgccggtccactcaacgccaacgtcgatggcagtcgaggtcgcagtttaagcaacgtggatgatcctggctcaagtcttgcacctgccacgctcgccaatcccccggcacccacaagcatgagcaaggcggcagtggttgtgagcaatgaaagaggtattggaataggcgtctctgatagtacgggtggtatgcctagtggtatgatggcgaacgtgtggggtagctctaactggggtttcatgaacaagcttcgacgggaccaacaccagattgatggagtatctgatgggccgtctacattgggtgatggctcaacacacacgattgccgcacaacccgatgcagcgggtactttagtggcaccccgacagcaatcaggtccacgccacaggcagacagtaagccttgatggggacgatgttaagctcacgcaagttgcactgggtatcgggtatgaatatcccagctactaccctcaacaattgaggattcaagatgctcagttcagattgcttttcccagacgtcaagagagtggaagcattggtcttggtgttcagagccacctggagccctaacgaccagcaagaattccccggacgagcttatgtcacaacaaggaacatttacttttatagccatcatttcggactggttttgactaccggtgtgtctttggagagcattaaggaggtaactgcagctcctgggcgagactgtgacttccttttccttcatactattccacccctcggcagtgatactcctggccgggttacgatcaaaactttccttgaacctctccgacttcttcaaaaacgactcaacttcttgatccaatgctccattgccgtcgagcaattgagtttagaatcattgatcaaagctttgatcaagatggacactgggtcttcagcccgaacttccagtgcagatagctgggatgatctttcatccggactcgcaggcatcaaacatgacgggggcaaagctacagacctgggccatgcgaaggacattcgactgcctatttacgttgacaaagatcttgagctggatggaggcaggactgcccgtggtcgggatattgctaaatttagacttccaacacaacccgtggagtatgttccacaaggcgatcttgtcttggtgaccgaaaaaattctcgatataagccctaaagctttgttccatatattatttggcgacaaaagcgccgtgtggcagcttcttttacacgagaggaaagctctaggttcgtttattctaaatccttaatcacttatacatggctgacatttcaaagagatccaacaaggcccatgggctagtacggacttgcggcatctgaagcgtgacttccactacaatatcgccacgacagatatccttggtaggcttgattattgatgatcttgagatcgagccatgactgattttgtataggtcgtactcacgaaaatgcgatatcggattatcagatcattgatgttctcaacgaccatctgtgctacgtgatcacagataaaaagactccgtggcatctccccttccgccgttcgttccggttggttaccaaggttgtcattacattccaggccaagtcgaagagcaagcttgctatttatacgaaagtcgagtggctgtggtctccctacggcctcaaaagtgagttatcccctcccatccctcccattcgaatattctaacatacctagacgtgatcgacaaaaaagcaagtgaagatctagaacaagactccttggatcttgtcgacctagtcagtgaccaagtacgtcgattgggtgcacacagtcgcaccaaaaaagccatcacgatcttcggccatgttggacgccaaaacaacgtctcccaatttagtggcgctggttccaacctgaagctggaacctcgcaagccccgaacacagcgtgctatgcacgaccttcttttcgagaccttcttgtcattcctcgaaacgagtgtttccttcataatggtttgggcgtttgacgtagttcgctggtcttggaagaccatgagtgctcacaagatcatcctgaccatgttggctacaagtgccattttgaatggatactattcttcgcgggatagttgggactggtggcacgagagacatgcaggcaacttcatggcacggctgggtgtacagccaaacctcgttatgagcaaatctatctacatgcgggatattgatgacgcggttgcaaactccacaatttggcccggcgccggcaatgccagtgattgctttgctaccttccacgagcagaccatgcggtatgccgatatgcctctgtcgctcagtccatccggaccccgggatgcattgaccaagagcgccatcaaacgcttccagcaaactcgtgagcgccttggcatgtatcgacacaaccttcttgtcgcattgcgtgtcgtgaacagtattgagaaagaggtcgtccagacggaatgggagcgttggctgcgcgaggaagtccggcgctgtcgccaggtcgaggttctccttggcggagaggccactccgggcgacgactcgcagacggaccgaacgaccaaagctgagcgtgtctttgccgagcatgctgacaacgtcaagcagtggcatgaggagtactgctcgagttgtcgaatggagcaagaacatgtcatatccaatgatcctgacctaattccttgattttcttcctacagcagtttccgtctccgagcatattgtcaagccttctgtacagccatctcatttcttgcttcttgcttatcactataccctgtggctagctgatcatatgtcaaaaaaacttgtgtataatttcggcgcatatcatacaagtcgtcattgctttgaatgtgctctgtatatctgtataccacatggataatgtcaattcactgcttttttgaatgagtattcgtcacataatttagttaacccgtaagggttgagaatgcaataggtttattatgtacatatgagaaccatcaatatccacgcactcagttctgcctcggcttcacctcaccttcatgcacaacataatatgccaccgtcccgtccccacccatccccttatccaccatagcaagcaaaaacctttgcgcaccccattctttggtcaaacgagccttttccttcttatcatagtattgagccagcttttctgccttttcaggattcagattcgccgcctccggctgcatgcttgtaggaccgacagatcgatcatgctctttagccttttgctcgaactcaggaagccggtcaaacacagcacccatatgacgcaaggtccacggctgaccctgtgtagttggtaccacgaaaatccgctccggcttcaggtcctcatcgcggattccgttttctagcatgtacagctgctcatctggatgtgtgtacacgcggtgtggggggtagccagatagcagagggattggttcttgtggtgattggcggggttctttttttaatgtgtttgagtcgtctgatcgtccaggaatgatgtctcctattatagaggtccagaggtgttggtgttcgaggttgtgctggacctgggcggatgttgcgaggtggggggactcatggcctttttcggtgatgcgttcggtgatcgccgatgcctcgggctgtttagtgacttccagtatgtctgccatcatgaatattttcttggagctttttgtcttgttagacttagcagaggagctccggccgaggatttttgggattcaccgcctggatagatctgatttattgacaccgctttcctcaatgggattgtatagttgagataagaggcttggaggctcctaggttagaagagagatttggaatgataaaatgaagaatggcaagtcagatatttcttccatctttgcaccgtgagttcaagtaaaaatagaacagaaaaatttatgtggggtggcgatcataataaggcgaagtaagaacacatggcatcttgttgttttggtttcaggactccaggacccgacaacctaggactatcctcgacacagggtcatttccccaccttttcgcatagtttatatcgccttgtcttgttcgagtcgcttggattttcaacttgtattccgccttgattacccgcaatgggacgacaaaagcaaggcgcgccgctcaagagagccccttcttctcaattaatgcacatctcagaagagtccgacgtgggacaaaattctggaaacaatacagacacagtctcgaccgccaagggaagcgtgtccgaaaaagcatcagcggccctggagacagtcaccgacagccctgggctgacgcaacttgcgatttgtgttctcggtatatatgcggcattgtaagtgcctccaccgctaggactggccggagaaactaacaagacgaaaagcctctcgtggggtgtgctacaggaggcgatcacgacaaccagctatctcgttcgtcctgcaaccgttgcggagccaaaccctccaacggagcgattcacctactcgctggtgctgaacacggtccaatctctcttcgcggccatcaccggctttgcatacctactattctcaacaccgagtggccaaaaaattccatctatcttccctacacgccggatcatcgtccccctgcttctagttgcaatctcctcgtcacttgcgtcacccttcggctacgccagtctcgaacacattgactacctgaccttcatcctcgccaagtcatgcaagctcctcccggtgatggtcttgcacctgaccatattccgcaagagatacccactgtacaaatacggtgttgtcctgatggtcactctcggcgtcgcaaccttcagtctgcaccaccccggaactagtaagaaagtcgctgccaaggaccagtctggatcctccggctggggcatcttcttgttgtcaatcaacctccttttggatggcctgaccaacactacgcaagaccacgtcttctcctcgcccaagctgtacacccgcttcaccggaccccagatgatggtcgctcagaatgttctctcgaccgttctgacttctgcgtacctcctgatcatgccgcatctctcacagagcgggattttgcacaacttcctgccattccccattcccccgtctaatgagactgaactgtttggtgccttctccttcctctctcgccacccagaggcactgaagcatgtccttgggttcgcggcatgcggggctgttggccagcttttcatcttccacactttgtctcgtttctcttcactgttgcttgtcactgtcaccgttacacgtaagatgttgactatgctcctcagcgttttctggttcggacattctctgtcccgtggccagtggctgggaattagtctggtcttcggcggcattggcgccgaagcagtggtacaaagatcagagaagaaggcgaaagagcagtcgaagattgaggctgcaaagaagaagttgtgagttttttttgcgaggctttatagataagctttcatttgaagagcatttagatttccaaaatataaaccgcaagttacagcctctgggtgggttctcgtttcacatatttttctcgggccttttgtgggtatattcttaaggtgatcgttcgtctttcagaggacgtaagtaatgggaagaagctcacttccgcccctcaaccatgatgatatgatatccaaacccagtcttgacctcggcatacttgggatttcccgttgtgctaatttcaagctcaaaagcaacattctcaaatgcagggtccagcccgcccttcgtcttccatccgagcgaccctcctgcggaaaagagatcagccgtgttactttcgtccctcaaagacttccttaccctgtctagccttatcctccgagaattcacgagcaacctcatcgaacttggtgccattgcgaagcttctctagggcttcttctttcttggcgtgtttctcgcactagatgtgattagaatgagctatataacaaccctttcccctgtccacgggatctggtggtatatcggctacccctcagaactataggcagaggatccgagattgaaaagaaaagagccaaaaaacatacaagaatgtgccgcacgttaatcgactgtgcgcctttcactgctcctccctttccaccttttcccttggcgtcgtcagcagaggcatccttgcctttgcccttcgcggctttggcgttgttcttgggggccattgtggaggaaaggtatcaatgatacgttgttatcgctgtctcggccgttgtttgttcagattgagttgatgtggggtggaaacttatgcctgaggctgtcaggcagaaaggatgtgtgacgtggatgcgggtgtattgactctctgctctaaagagttctagttaggcatatgtatggaattatcccagtttacacattgcagcatcttgatttctacaaaaccattcatctctcctttcccttcgcttacactgccaacccctcatcgatagcgattgctgagacaaaggaccgaagtcagcaaggactagggactacgtatctactagtccgagtttgaaaaccaaatgggatttgatcttgaaaagtcacgcatcatcgcattgcccgaggatgcattctatatatcggacttcattacagaagacgaggaggactggctacttcagaaggtaagtgacagtgcttttcttgtgaacatgtgtccttagaaaccatgccctaagggattgatgtcaaatattgcactaatatatgtggttatcattatgtcgtctttcttcaattatacctatttagacgttgcatgtcacttattcatgctcagatctcactcactgcaacaattcacaggtaaagtcagcaccgctgccgcgctggatccaactctcgcaccgcagacttcaaacatggccatcagccctcaccaagggtaatgctcttctcgaatcgcccttaccagcttggcttcgatcaccgatcgtcgaaccgcggtttgcggccctgtgtatctttaatgatgcgccacacaaggcgcccaatcatgtcctagtaaatgagtatcaacctggacaggggatcatgccacacgaagatggagatgcgtactaccctctcgttgcgacagtgagtctaggggcgccaattgtgctcaatttgtaccacaaacatgcccagggggacagggaagaaaatgaggcaccagccaagaccggaagggatgttgccgggatacccgacacaaaccgaaggccccaatacaggattttgcaagagagacggagtctcctgatcacgaggggcaagatgtacacagactttttacatggcatcgaggaaacgacgagagatgaggatctgagctctcgctctatatgcaactgggagctcttgcgagagagggaaccgtaccagagcgggtggtatgagcggaagacgaggactagccttacatacagggatgtgcttcaggttgtgaagatggggaataccttgaagtttttaagtgggaggtaacgatgacctcatttccaaattccggttcttttatttatttttagctctatgttagtaaacatatggaatcataaaccaccagtcctgcaccgagtctttgccgaacttttgcgcataccactgcttggtattccgagctgtcagacccaggttgaccgcgacgaaagccaaacatgaaaacatagttttattgatccattcacctcgcggagcagccaacagcgctaacgagagatagatgatgcattctgcgccatagtggggacaggcaaccccgcggaacatgggatgctccggaagggtatattttttcaacgagtagaggtagtgatgggagtcatgctgcaaaccagacgccaccaggaagagcgggacgagaaagaaagtacgcaaacttggggcgttggtcatctgtagatgagcaatggtcaggtttttggtcaacagagtgccggaaccctcgatccaaatcgcaacccctgccgctaggtagaaacccaagcctaacaaccagtgcataaaccacatctgggacgacgagggtttggagaaaacaaagcactcccataaccgccgcgatccttgtatactcaatagaacacaacagatcaccaactgagtcagggacatggaatgacgttggtggtcctcgctgacgcgggatgcaatggcttggaaaaccaaaccccgcgatagcaattgcgcaatccagaagacagacgacaggacagatgcaacatagaaatgagtgaaataactatgtggcacctgccaagtagcaagatagtcaaggaagcccttgctctgggtgggagggttctgggcggtcgatggtgcagagccggtcgaggccgaggccgcgcgtggaccgtaagtgaggaagcgggaccgtagtgaggttgggatgctgatcgagaatgtctgcatagggggtcggcgttagtcgggttcatctgcaggtggtgttcactatcaccactatcacatcgcgtatcgtaccgtggcggcggccagcaggaagaacgcgcgtagagcatccacggcatccatgccagtggcatccagggtgttatctacccattgagagattagagacatggctcttggatgagcgtgttttttcccccgccccttctctttttttccccccgtctctgtttcgtattgtttctttaacttagtgtcattgtgatgatatcagtgagttgttttagggaggtgtttgtggtggagaaacccagcccccccgccgatccctttcgccaacgggggcgttggggggtcgttgggcnnnnnnnnnnnnnnnnnnnnnnnnnnnnnnnnnnnnnnnnnnnnnnnnnnnnnnnnnnnnnnnnnnnnnnnnnnnnnnnnnnnnnnnnnnnnnnnnnnnnnnnnnnnnnnnnnnnnnnnnnnnnnnnnnnnnnnnnnnnnnnnnnnnnnnnnnnnnnnnnnnnnnnnnnnnnnnnnnnaccccccccccccccgccgatccctttcgccaacgggggcgttgggagttagttcggcctcggggttagctcagggataagaacaattagggtagatagaagataaagggccaatttgcgtctgataagagttagctctaagtttcttgtagagatgtttcatgataataggcttcacaaaatacatagatgggccggtgcgctgagtggcgactttgaggcaaatccacttgaccatattgggtctagtctggtcagggtgtttgtcgcatttgcaacatccaaatcgggttagtggccaaaggtctgtgcccccttttcttctcggtatcacggtatcacggtatcagctgtatcgaccgtatcaaccgtatcaaccgtatcgtctcccgtatggagtcttcgccgaacgagaaggacatccaagaacggagtatgaaaaaaacaaaaatcgaaataatcaaatatcaacgcgggttataacctcaccccctctaagatacaagcatgtttccagtagccaaaatccaacctgcagctcgatgattctactgtggccaaacctgccccagtgaggagccctagcccaatgaatccagtcccattcctttcccttcccgcttttcctctttatttctctttcttcccccattcaactcccaagtgaaaaacaaccctcgatttcatcctcgatctatatatccataccagtaaatcctatatccggacctcttcgaccaacttcccgtatcgctcccgtatctcggagcggtattgcccacgtttcaagactctctttgcgggtgaaacccgcggtcgaggatcggtgtccgcgcacaactgctggcgttgtcgaccacggttgttttgtcggtcgcgttttccccccaaaatgacgagcggcatttcaagtcttcgagtgctatcgctatgagtgatgtcgaggcagtctctttaccagctgccctggacgtcggtcagaataggcttgccacggtaaagccagaccctgttggtccttcatcaccaggcaaagctcgtgcagaccctcacccacgggtaaacagcaatggaccgacacgtgtacattcggaaggggaggaggacgggcctcctagtcctagggcggattcggaggctgagacaataatccaatcaggtcgggagtccttgtcaccggagaagaaaaggaagcatatcaaacacgatccgagtcgccatgagcctaacggaaccgatggacatcagcgaaagaaatcacgggtgcttgacgacactcgacaacgcgaacgcgagcaggaacggagccctccttctccaagccaccgagaaatctcgccatcggtggtcaagattgaaaaggtcgatgatacgcagatgtcagaaccggaaggcgttaccaatggagtcgaccttgcgtcagagatacctcgtgctttccgtaagcgaagcttaagtgacagtgctgaggaacaacaagatcatcgtcgcgcacatcctgtgcaggaacttaaacataccaataatacacgcctatccagacctccgtccaacgcgcgatcactctcacccagtcgaccctctcaccaacgatctgcttctggctctcagttcccgaagaaaaaggcgccaacccctgtacttacaggctctgggcgacatagctccgaagacagacaatcgacgtcctcttctcaaagcagttctccactgccgggagcgcatctacggaagcttggttctggagtcggtgcgtccgcatcgcctgctaagcaaatgggaccgaagaagttgcgtgacaagagtggccggactcctcttgcacgagcgtgtgcggaccggaaacatgatcaagtgatgatgcgccatgctgaacgcccagaagacattaatatccccgataatgcaggcaacacccccctgcagatcgcatcgcttgctggcgaagccgaaatcgttaagttcctactagatgcaggctgcgagattaacactaaaaacattgacaaagacacaccgttgattgatgctgtggagaatgggaatgtggaggtggtcaaacttctgcttgatgcaggtgccaacccacggactgtgaatgctgaaggcgatgaaccttatgaactggttccgtcctttgtagatgatgatgaatacgaggagatgcggaaagcgcttgcagacgccaaggccaatttgcggcctggacgacgctcagaggaaaataccagaccagagagcaaggaaccttcttcgcgacgggcttcggcagttagaggatcagcagctagcccccgagattcgcctcccatgcgcagcccccctccagtgggtgtagcaaatcgacggaagggtgggcgaagcgaagctacgagaaatgacctcctgtggacaaaacccacattcgagaatcttcgagagtttgctgccaaaggtgacgaggctggggtggtgagcattctgaatattttgcagaaagctgacaatgcttccttgattgctgcggcaaagggtggccatcacgatgtgctttctcttttgtatgcgatgggcaatgcagacgcggatccaaacccgttacgtggtcagaaaccaggttataacacgcctatgcttgctgcgattggtcgtggcaacagcgctgttatccagctcatccttaaccaacccggattcaaccctacgcgtcgactgtttgaagaaagaacatattttgaactgtctcgcaatcgacagggtgagaactgggaggacgagcatcagattctgaaggacgcgtatgaaaggtttgctggttccgacaagggtcgcaaggacgactcgccccgccgtgctcgtggaaaagagaaggaggagaaacgccccccacgccgaacctcttcctctcccgtcgcgcgtaaaaaaaacaacagccccaacgccaaccgaaatcgtgattctttgaaagacatggatctaatcaaagaaaagcgtcgtcaaaaagagcacgatccatcacgaccatcggattcctccaaacccaaatctgcgttatccgctagacgagacagcgagtctagtggggtggcacccaacgaagacatccgaaagagacgactcattcctggacgtcgtccacaggagcgtaggccaagtctattttcgtctgattcgctatctggacgtgaagaggcaccgaagccgcgtgttgacacagcacttgacagcacaatgtctttgaagcgcattcgcactgatgggtctccggaacgatctcgttcccgtggcacagacgctgaccgcttatctcctgagtcgcgcaaaaagaagagacgggttgtttctgaagataagtcttctggtgctacgcacactgcatcaaagcaacctgatgatgtcagtaaaccacatcctcgccgaccaaatgacgactctactcgatctgctgaacctcaaccacacaaatccatcgacacctccaagaaacctccaactcgcccaacttcaccccgtcatgatcccgttaaaaagaatggtgatacgagaaaggaatcgcatgagcccaaagccgacaccatggaagacacaatggccgtcgctaaacgtctcgagcttgaagcccatgaacgtcgaagagcccaggctaagaaggtgcaagacgagcgcgccgcgaacgaaaagcgcattgcagatgaagccgagcgcgatcgacttgccaaagaagaagctgaacgagtagctcaggttgaaaaagccgaagaggaagaccgcaaacgcaaggagcttgaacaacgacgcgccaaacaagctgaagatgatcgtctgaagcggttggagcaagaacgtgctcgagctgccaagatgcggcgcgatcgcgaggcagcagagcaccgacgtcgtgaggcacttccaagtcgccttcgtgttgcagcgaacctcgtgggctcaaacaacccccgcgcgaaaagccatgactggctcaagtcttttatgcctctcgttaccgctctcacccgtcaactcgaccccagctgtgatgtggatgtcgccgacgagaaatggatcccaaactatttggttgcacctcttctggctaccaatgatctccaactttcgcagtatcccagctgggagaagcgaaaggcgacaccgactcaacgtgtgaatttgtggcgagtcacccgtcgcatgttgacccatacggatgatgttggattccaaagctcgagcatcggacagatcatgcagaaggattgtgatacacgccccaagtatttcgagatggagcatgtcttctggatccgagtaagttttcttgtaccttgcaagttatgcttcaaactaacaagtattttagctttccgatttcacagacctcgtcccacacattcctcacctgcacggcctagagctgcaattcttgaacatgcacgtcgatccggagccgccgacggctggtgcagatttcggcactccccaaattaatggccatggcccgggatcctcggtcgaaaccaatggaaccgggctcaatggttatggcccttctcggtctagtacatacgtctagttttgttttcagcgtcttttcgccaggacccggcgcaatgtcagcaattcagcgaagcggtgtacagttcggattctgattgtacgattatgatacctcttgcgttcagtgatgattcgactatcattaggtagttttgttgggtttcttatgtagtcacactgtaatcatgcatccccgtgtcaaataacactgttcaaactcatatcttcaagttcgtatagatatttatagtaacttatcaaaccatatataagctagaaagctaaagatgataagtgaaaagtgccatcaaaccgaacttgtcgtacattgtatggacaaatatatcacgtgactgcgtttgcggggacagcatgacataatcgtagggcacacacagccgaaaaagtcgaaatagcgggaaatttcactgcgcccgctccacctcttaatttctctctccaacaactctactcttcgaggatcatccgatttcaagcataacaagcaacaaaatggtatgttttatacctgcgaattaccctcacaccacatccgtacccaccctgcatcctgtcacgacaattgagacgctggaatggacatggccggcgagagcaattgcgtcgccgcagtagaggtcaccctcgtcggatgtttaatctatacgctgcaccggtccaaactaatcccaagtctcaagagtcacgacaaagatctacacaatggaacctttgaagcaccatatactaataagaatccttagtcggacggagaagagcccacatcccccattgcccccgccgaggaggtcgaggtttctgccgatgccggtagcggccagatgtccgtcttggacgccctcaagggtgttctgcgcgtctccctgatccacgatggtcttgcccgtggtctccgtgaggccgccaaggccctcgaccgccgtgaggcccacatgtgtgtcctgaacgagggctgcgaggaggaggcttacaagaagcttgttgtcgctctctgctccgagcacaagattcccctcatcaaggttcctgacggaaagatgcttggcgagtgggttggtctctgtatgttctccctctattgatgtaggctattcatctcggggtatgtttgctaacattttgttcttcaggcactctcgaccgtgagggtaacgcccgcaaggttgtcaactgctcttgcgtcgttgtcaaggattggggtgaggagtcccaggagcgctccgttctcctcaactacttccagaccgagcaatagattatttctattgagtggctgtgagtagcaggtctcgtttcaggcgctgggttgactgggggcatttgtggtggagatcaaaggaggaatacatgagaggtagatcaatgtcgaaactactggctggactcggagtatcctctctgggtttggtatttatgatggtggagatctgtgatatctctgtttggtcttttgaacctgtcatttcgaatcacctagtctatagccgtgccccgtttactcgggttcgcggcaccaatggcatctggacatcttgtctcctttgacacaaataggattcgaaagtatctatgtgctttcttgtagaaggttgttaatataagtaatatcaacattgtcagcaaggaacacaaaggcaatccggaaactctgcatatgaaggctattgtccaccaaaaacgacgaaagtccccaatcaatgaatgaagactaacactcaatcgacatatataggacgttcctacgagaccttctcctagatgaaatgcgcctcttgcatatgtaaccttgtcagtgacaggaggcggtttttgcgtaagtctccattttcataaatgaacaacacaccagtgacaccacatgccccaagtgctgttagctcacaattcaagcgtaagcacctagcacagcgaggaatcaagtgctgcactttcacagaggccttttcaagagacctatataataatatgagacaagaagggcaactagctatgtaactacaatatgaacttatgtacgaagtatgtactccgtatggtatccacctttcgacaagaacaaatgagaaccagcaaaaattgatgtctgtcttccttggctctataagtcagacattttgtcggtctcctaagggccattcgagactatatcaagcttaggagctgtacttcttagggctgcccgcaggagagtggatcatctgagtcagccggatttcgtgacttccctaactccgactgggtttctttgtttccttggacagacgctcttttgaggaaaaaattccctttctttttcttctttgcatagattctaatcttgatgagaggtgcatattgccattatttgccatcgttttactctgtattaggctccacatcctattgagacaagcattgtccaatatcctaatcccgatataactccaatcccgaatcccaccgggcatcgggatgcaatctgctcaaatccagggtgggacccctgagccatatggccgcgcatgtatgaattgttcccgcgccaagtgcaaatgtattctttccgcaactggtagtggctgcgaaaggtgagtggcactgctagagagtgtggcaatagcctgaactaagcacaccggtagatgccagcgcctgaacaaagaatgccggcctgcgcagacagtccgcaaacgcaataagccggcgtcgggttctaatactgcccatcttgaagccaaactggattggattatgtccgcgtttgaaaagagtggtgttacccccagtcttcctccagattggcaacctgtagacctagggcagagtcaacggcatgagccaagccaatctgcaccaatcactcaaacctcaactagagcttcttcttcgactgccgaggaaggaaattaccctgaacactttcttccctcgtatgatccggagatattgtctctgatctacgttccgcccgccatggctcagaagtacctcgaccaattccgcactcggaatttgcaatatctcccctttgtccacatcccttctaatataacctctgaccaattgcaacagaagtatccattcctttgggtatgcattatggaagtgagcacgtttacaaatgcagaaaaaggtgactctttcgggagaattaccaaccatattcatcagagagttatgctcgacattgcgccgagcatagatcttctccttgggatcatgactttcgtatcatggtgagtagagaagaagtaccctcatgaaaaccactttcctcattacaattctctttgcagggtcacatacactaaaaggccatttctcaatgtctatgcacacatgctaatggcggtcgtcgtcgaacttgggatcaatcaaagtgtcccaaatgagtattcagccatgcattctttcaaggtcgctatcggaatgaagcaaactccacccacagccagaacactggaagagaggagggctgtgctgggatgctttttgatttcatcaaggtaattagcaaatacccagagatccctaagcaataattaacagctatactaccagcacggcattggcaatgtccaggattgacgctatgcgctggacaccgcacatggaagaaagtctttcaatactcaccgatgctaaagagtgtccccaggatgagctcctgatcgcactggttaagatctatttggtcttagacagagtccatcaactgcgacgggatggtgaggtttctatcccgctagctttctatctggatagcttcaaaaatcaattggatacagtgaaaagccaaattccgcctcaccttcaacagcacagtatgtttatacctcccctgagtcttcacagctatgattaacaagacaaaaggagttgtactgatgtatctctacaatgccgaaattgtaatcaacgaattatcaataggagaccccgccattgcacattcgcctgatctccatcgacttgacagcctttacacctccctccgagcaacaaaaggctggttagatgtatggctagagcttgaaggagaggagtacctacagctatcatgtgtcatttttttccaattcacacgagccattgtcaacctgtacaagctcaccattctggaagacccgcaatggtctaagagtatggtccgagacactgcaaatatcctcgaatacctgaacaaaaacgaagccgtcatcagaaaatgcccagaatacatcactttcgaccaaagcagggaaatgaacctcctcgaaaagggattgagaatggttcaaggcatgcgaataaattgggagccgaaattattggaactatggcgcccaaacatgcccgcgaataccgagatcgatagtggtatgatccagtccgatactatactccctgatgttatgcctttgggtgagattgatgaggcttggatgatggacttccttgggtcgttataatcttggtctatgaagcttgaaacgttagctaggaagtaatatgagggttaacggctttatacataatataatataccccagttcagtcatatttgttgccatgtaagtgggggactgaaaaggaagatttcatcatcgcgataaggtacagcttcaacacatttgaaatcatcggggacttggcctttggcgagccctgtgactgcttacgggaaagtcaataccctatggtcaatacggtctttgtgaacatgatagattgtcaggaggcgcgtcccaaaaaggcttacaaaaatgtgagaagactcattcgtcttggcaacaaacaaagctcatcgcttattagagactaaggttgaacggccggatttcgatttatatcttgcgatacaatgatgacaggtccatgaccacgcaggagatagaagcaaacctagctttgctgatactcgctaggagtgagacgactttccaaattcacttaatatagcacggcaaatctcctggctgttattccgcgtgttgtactaagggagattgcatttagggtagtttggtttagagaatgcatttatctgttttcgacactattctacttagcctcgaggcggaaagtcggacagtcagacagtagttcaaccattttcacttgggcccagtaactgtcttagagtaaaatgaattttggcttatggtatcttcagggaccgggccaactgtattcatccacaactttgcctttgtggagatgcgtctaactgcgaccagggtcttctggagcttcgactttgacacgaccatggacgagagctcaactgcttgaagtattagaaatcctggaatttctgggaacccaggccgttgatggtgaatcacagcattaaaagtgtttcaattagccgtctttagttgcctttagtataactaagtgttgtgaattgctatacaaggtacccaggtagccattcatattatagaatcgctcgccacattcgtgatacgagaggagggaccattaactagcacgtcactatctgccaataaacaaaattcttgatattatatgcgcgtgcccttttggcttttgggtaaccgagaatgtacatatttatatcttactgagaaatttactgcgcatacatgtataagattgtcctacaatagttagtccttcttatacatatgtgtacaactttgaaactgagacaccaatcaacgctggaactaatgagattaagatcataggctagggctgcacatttgaagacaagactcggatttgatctttcttgaagatctagccctaagacctgtctctgaagttacacagcatgaagtttaagtgagttgaccgttgggtgtatcaatctttcccggtgaggccggctttgtggcgaattgagatgaatatctagatcggacatgcaaacttgacaagggcctagcttatgtatcgcaatctaaaagcaagaaaaacatcaaagataaggtacagcttaaagtagcacactcggatagcaaagtcgagtataaaggttgcttcttacacagcagtcgatctactactcaccattgactattttaaaacatcgcaatcaatcaaaagaatgtctagctttgtctatatttttgcactcgtgcctttggcactggcttccagtatgatcaggatggtccctaatcaggtacggctatatggagtgtgtacaccggatcaacttgtttactctttatctaggctatgattcttaaagaacacgacttcgcaataaatgctggccgaaaaggagtgctcattgcgtctgatggaaattgcatggatcttgacaacatttccgactagtaagttgaatattattcccaaaaacatgaagttttgttgacgaaagtatcagccgcataaattttggatcaatctacgtcccatgtccgtccgaggtcaaggaagacatgatctgctcaatgtactcctaagtaaatagcctctgactacaggtttatggtgttaaattatctagcgataactcttgcaacaacgagctgttcacatttactcgaccccatgcaaatttgttcagaccagctgttggcgatagtgttggtagacatgtcagaagcattaaatgcacgacagttcattctcctgccgacagacaggaacatgtattctcaagtgatcatgcatctgccaagagtccaagcaactgccccaatgacagctgttccagtgaactggactgtcaatcaaaccacccggattatggtatgtactgctcttcgagctctctgacctgccagtgaacctctgagactggcagacattgcgaaggagacagtcgatgttctgggggacaattgttcgagtggagagtgtatgactgttgcagaaaactcgcgttttctgcagggctctgggtgaccttctggcctgcagtgtcgtccgactcattttcattggtctggagcttctaatgtggagatggtctgcatgaaagatgaggatgctcgcggaatacagtgctctgctgaaaggccttgccaagagcatatatcgtgtgttcttcagcatgagactaacacgtactgtgagtggaatggtacttgtgggctgaatactatgagctgtgagtcgggcagtcaatgctgctctggattttgcaaggccaacttatgccagtgatagtctttgcggaagatgtcaagcttggaggaaatggtatttgaattgagataaaggctgaatcttagctcggcttatgcaacaaatttgtttgaaagttactcctttcggggacacagccgctgaattctttccaatgcatcctctcgaatttcgcggacaatatcttctgcaggtttcacaccatgtatcagtcccacagaggctcctgcatatgtcgcaagtctcccctcaggcccccagccgttatcgcccgtcttagcagcctcatcatgaagtcttctcagttcctcaaagggcttcccttcctgccgctcaacaaatgatttgttcacgatagtccggggactatattgctccggccacccgaaagtgcctcggaggtgattatatagtagcgtacgcgtggttgaggccgcaccatcgaccgcacgtacaacctcgtcctggtagccctggctaatgcgtgcttcactagcagccaggaatcgagtccccatcaccacgcccgaagctccaaggcacaaagccgctgcaacaccgcgcccatctgcgattccgccagctgcaaacaaaggaatttggctgcctgacatggcatctgccacttcgggaaacagtgccataagccccattccgtctttcgcccgaccatggccaccagattcagctccttgcaggacaatgacatctggtcgctcactgttcagaagaagctccttcgcctccttcagagtgccaatttgaatccagatttgggtgtcaggggatacttggcggatcttgcgagaccagtcgtcgtattccttgggtccctggcgtggagcgtatagccaggctgcacatggtttatacttttcgatagcggcgacggcaacattgatgtcgtcagcccagagctggtatcctatgccgacaggcagtgtcgagccgggagttggttttatgccggcctcttggtgtatgagcgatgatgctttctcgagatcatcacttgtatcctgtgttttggcaccggggccaatgaaccctagcccaccagcgcgagagacggctactgccaatgctggaccggacattactttcataggtgcgctgaccacgaatggagtagatacccatgggtatcgcgatagcaagcttgccgccatagtttgatgcttgggatagttggtagatattgctatttggataatatggcagtgagagcggtagttgtgtggtgccttgcgttttgtagttgccgaggaatcgttgacgtcaccatagaaaccccacaatgtccgcatacaaaacaaacaccaaatgtggctggaggaagttgcaaggcctcgggcatcacatgccattcccgcaatatccgcaatatccactgcccactcattccatccgtgataccctacttatcccattccactcggaaattgcgggatctctatcctgcttattgttcgaagatatgccacactccgacctcaagcgaatgcgcactagagttgcctgttacccatgccgggagcgtaaaagaaaatgcgatggcgctgaaccttgtgaaacttgcagtcaatggggctatgattgccactacaaacgtcagtcacgacagaggaaccatcctccccaacaaccacagagagaaattggtccagatccaaggcctccacagcaaaccgactcggttgatacacacgggctggatcgtcggttgtgggcaaactccggtgctgcgtttgttcggaggatgggtctgaatatcgatcctgcgaaagcgccaaaacttagccttttcggttggaatattggaaagcgacaactgtcgtctgaatctcaagctgtatatcctgtgctgtcaattacggatatcacatcattggaacacatgaggaccctcgctcaggtctacttcaccaagattgctccatactatggctttattgattcttctcaattttttgagcgactggaggctaggtggcagtctcccatgattagtagtctatatgacagtgttctaggtggggtcgctgcactaggttgtttgcattcccaacgaaacatgaccatcaccgagttgcatctcatcgcatccgcacaatctattctcgactctcacgttctgtgtggggctccccccgtagaccttctcgttgggtggacattgcgagtcgtctatatgcgaatgacagatctgcctcactcaacatggatggcgagctcgaagttgatgcatttggtggaagctgcaggattccatctagagtctactgattcagtctttccgcgtagtattgacacggagtttgatccagacatccaaaggcgactcttcggcgtggcactacacctgaatatgtggacttcttatgatcttggtttatcaagagtgtcctttcgaaagaatgatctgccattactcccatcaactatcgagggtgactacacgcatgagctgctggggcttattccattatcggcaagcctagatccaggaaagccaaaagaagatgatatcaagctagaagaaacgcttgtgcagatactagaaagagtccataatgagcctccctcggccatggcgcaatgcaatcttgtgctttgcattctgcgcagaattcacacagagaaacttgagatctctcctctcctcgcagaaaaagccttagcggtgctggaaaagggactttcttgctcacgcactatggtcgcgaactgcactccctggcaacatatggcaaatgtacctttccacatcatatgtctcttgcttgtgatggacacacgccaatcgctagcgctactccccgaagcaatgcagacactgaagttcgtcgcctccacttacgatacaaacaccttgagagaagcctggagtgcggctctcttgctggttatgcttcatcaacaacggaggaaagatgatattgcgatcttcaatgacatcatgaacatggaggaacaagaacgtccagctggactatccccgcaagaatttccaagcgcggaagagtactcatggctaggggctttggttgctgatctacccggtttgcaaagggatgaccttgatcaatttctgaattcggatatgattgatagttcaagtttcttgggtggagctagatgaaccctacctagaggcacttaagtttttgagacatatctaattctgtgtgaacattgtcttgcctcattttagaccttgtaatttagttttgctttgaagttccacatggtacaaagccttgcggaaattgcgggcgccttgctgtgcctggctggtaaaattctctgttccgcaatacccgcttctatacattgggagatcaaaaagctgtttgaacaaaaacatgcacacccattatttattagtgttcataacccaatattccaccacagtacaggaagctcggcctgaattcagcatacctggacatccaaccatcaagctcatcgacagaacgtgtctgcacgtcgctactctatcaagtccaaaatgcatgagaagacactgataggagccaataacgcacttccgccagctctttccaacacagtaagctatgttgattttgaagggaccgatgaccccgagcatcctcagaattggagattgtctacaaagtaagccacaagtccaaatcagccaaagatctggatattctgaatgcaaactaaccacattcaggatttttaactctacactagtctgctcaggcaccttcatcgtctcactaacaagcgccatcttcgcaccgggaatcgacaaagcaagcaaagcgttcggggtcgggacagaggtcggaacactgggaacaaccctctacgtccttggctttgccacaggacccctcatatgggcacctgcatcagagctacggggaaggaaatggcctctgacaatttcaatgttaggcggtggaatcttcactattgcatcagcagtggccaaaaacatccagaccctgatcatatgccgtttcttcgctggcatgtttggcgcaagccaattgactgttgttcccgctgtattagccgatctatacagtaacgctactcgtggtgctgcaatttcgctgtacgccctgaccgttttcgtggggccgtttacggctccttttgtgggtggcttcattgcgtcgagttatcttggctggcggtggactctttatatcccggcaattttcagcctgtcaattgcgctattgagttatttctttttggctgagacatatccggcttctattctcgtgacgaaggctactgctatccgcaaagagtcccgaaatcgcaatattcgtgccagacatgaggatgtcgaggtcagcatcgcagatctcgtggagaaatacttcacacttcctttgaagctgctcttcacagagcctattattctcgtcgtgtcaacttacatgtctttcatctacggcattgtctatgcgcttcttgaggcatatccctacgtcttcgagcatgttcacggaatgactcctgcttttgctggtctaatgtttattggcctcatcattggcgtggtacttgcatgttcctttattcttttcggacagttggcctatgcaaggagactggcagagaataaaggcatcccagtgcccgagtggcgcctcgctccaccactcttaggagcgcctgtctttacaataggtctcttctggtgagtagaatgattttctattagaatgatgtatgatgtcagctaactgtccatcaggtttggctggacggggttcacccctcagattcactgggttgtacctgccgcagccgggatattcatcggcttcggtgtgctgtgcatatttcttccatgcttcaactatctcgtcgatgcatatttgccaatgtaagttcttggcccctctacttgaagtagtcaagacactctgctaacctgaattgtagcgctgcttcagctgtcgctgccaacatcattcttcggtcagcagtagctgcgggctttccgttattcgcgaggcagatgtttcaaaatatgggaattcaatgggctagcacgctacttggatgtttagccgcaatcatgattcccattccgatcatattcagggtttatggaccatggctgcgaggaaaaagcaaaatatttgcataaaagtgccataacctggattttgaatgaggtgactttgtgggttctttccgtatggacaggtcacagtgagccacagctgctgccaggccgaaaagcatatatagtgtgttgataagagttgaaatgcttcatttacatattctcaaggtccaaaaaggttcgcactcatcttaaaagctcgatcgagctttagctctaagtgatcgtcccaaagtaaacaagcgctaatggagccgataccaacccaatgatggcgatcacgctgttgcccgatccataaccaagaacttcgtacatattgggcgtagatagcttcattctaattcagtattttaatttctgtcagttaaaataaggcatagttattacggcatattaaggcatcagctctacaaaatcaggcattcggccactgaccgctatacaccttcgcacgccactaagctgctttaggcttcagcagttctgatgacgtggattgcgtcgtagcagcttcggagaaaagaaattcatgtggatatctttcattattatgtaaattgagagcaggagggacgaaaaatgtgataacattggaaaataatacaaacgaactgctcccctgagctctgttcacatggagactacaattatgatattgaacaaactcaattagtttacttcaagagtcgcaatcctgtataggggctctctccgctcattcgaggttattgtcgatcgaactgtccacggcccatccattgagcatagtgtagtcggagtatggcgaggtgccgtgcagggtttcatagtgcttgcgaggcccacactctctcaacttggcagagtctgcgttgacgcaccgcttctgcatgatagccgcgatctgtcgacccgcatcctgtccttcatagtatgcaccgtgaaggaagccaaagaaggtcgggctggtagcctcaccggcaaaccagagccggccagcgttggcacgaaggttctgatgcatctccaaagatgtggaaggaggccagttggagtaactgccgtaagcccagggctctgaggtccagcgtgggtacatgaatgcagttggctcgggaatatccttctccgggaacatcttgcgcagaactgccattgcttcctgcttggtctgctcgtctgtttggcgctcggcccgataggcaaactcgttggtcacggtcacgaaaatgatgttagaatccgggaggaatccgggagtagatagtgactgccagatcgggtaccagccacgggtcacaggatcagcatagaggtggtattgtgtttccgagggccagaaggtctcgttgaactggaagaagatcttggtgtatgttcccatggtgaacttctgaatagcttcctgcttccaatcggggagttctggggagaagttcactgcgccattttgcagaactcccagcgagaatgtggtaatagcatagtctgcctcaacgcagctgccatctttgttgtgaacagtgacaccatcgtccgaatacgtgatgttcgtgacctcggtgttcaaatgaaggcgggtatcattgcgagtgaggaaagtcgaggcgagcttcttaacaatgatattgaatccgcgctggtccaaaacaaactcatcgtggtcgctgaaatagttgaaggtcaaattgttgcccgcacagccgaagacaaatgagctctctattggggagtaagcagcctcaaagtctagtcaaagatgttaatatcgcgctagttgcatctgcaagagagataacttaccccacgaccaccagtcagcagcctgtgcctccatatcatgtaccttggggttccaaccagccaaggccatgccagacttgacgttttgatcctggagattctgagtaagaatctcacctgccctctggttggcaatatcataggcgtcgtcataggcatcgaggagatcgctatagtcagaataaccatccttgttgtaggtagagacattgtcataatttgcccattcggtggtcaatccgtattttttagcctgtccgaggtcagttcgtgtccgatcgaaggtatgttcaagacttaccaagccccagatcgggttctgtggacctccttccctgccaataccttgtacctgtttgacctgtcagcggtgtcctttcctgtagctgaaacatgcatacccaattggcacccatctcaatagtataaggcttcccatctttgtcttcaccgaacgacttgtgccaagcccgaccgccgatagtatcgcgatactcgagaatcacgaaatcgtgcacggaagcattcgttagggcttgctatgaaattgtcagtgatagtccaagataaagcaaaggggaaacctacagcagcagtaataccagccacaccacctcccctatacttggtgagcttttgacatcgatcaataagaagtccagcacttacaagattgcaaccttagtcttcttgcacgttccctcagctcgagtgcgatgaggcgcaccgatagcaggctggatagcgcctgctatcgcgaccaaaaacgaaaggtgctgtaaatgcatggcgaagctctggagatcgcaaaacagccccggggatcgattgcaataaataatgcagaaatcgaccccacacagggctgtacctgcacatccagagaaagataagaagccgactccacgcagccacgcgacccgggaactccgacttcctcacaccttccgcaatcgggcaagtacatgcgggaagctaagagaagcctaatttaaagcgatataggtatctgcggggaggccttcaatatcctccgttttgtgatttaatcatctctaatctcattcctattacgtttggaatgctgaaattagcctggtccgtccatgtggatattcctaagtatcagatatactcgcgttcaacccggaatcttcgagataccctaatcgataacaaccaggggctactcgagccccgattgtcatccaatgtgctcatgatatcgaatatcgtcggagtacgatatcagttccgctaaaatggtgcacaggcaaggaaccatattcgacaattagtcccggcactgtagcctcggcagtcatacgtacctggaatggctcgaaagccgtgtagctctgtgaacatgcaattgaattgtttcaggcaatgtccccggatgatcgtcgtaaatgactctttgaaaaggctgcaggaaagactattgcttccactaaggacttcatgctcacctcggcgatttgagataatctagcaagctccggaaggtcgttggcagatagagttcgtactattgttgctgaggttgtttcaccgatgatcaatccgagctgttggccaacagaataggcagtaattgttgtctaccttcccacctcgactccgtgccgacaaagctacaaattatgtggtaaataggcccgccattccggttcctgcaaggaacactgggatcagactaagatagttagagctggagcaccagaaaaggagcactgcgaaagagataaccgttattcccaatccaataatagacggttttttatatttcatagttctgattcgatagttagacttagcattcaacttaccgacgaatgaaccgaccatgaataattgagccgagagcgatacctaggggaattgtgaaattacgaggcgggataagcccaacgttggccctgcacaatcaaacataagaaagggaaggttcgaggtgagctatttggttagcggagtagcaacaccatcaaattcccaatcgaaacccgtaggccgcggaggactgcgaattgtaaaagctcctgacaagcgccgtaacgtaacgactgggaagaaaacaataaggaggaacagtcctatgaatgacatgtttgcccattagttcggagatacacaattctcagggatggatggtcccatcgcagccaacactttgattggatcgccgaagcttacccaacgtagaggtaactgaaaggtagcttcgtaataccacaactttgaacggacaaacaagatctccttgtaacccacttcttgtatgcaatggacacggaaaggccgtgtatgatggggaggggggttatctaaagtcacagttagaacaatgaggtgtcatcgcaatagtttccaatgttggctttgagaagtcgaccgctcaagtggcaatcgtggcatcaatgggcatctgtcaggcgcgggtgatctacaagttatctctaaccagcatggcatttgtggtcgagagatttattcgtcatccagtgaatgatcttgtcaaggcagctgagacaaataggaaagccccagtcatttttctcatggtagtgtcaattcgattcacagaggccgagagatgattagtcgagtttgccgatgtctttgattggacatggccgaacacttctgcgcgagttctgagatacttcaattgctgtctcgatgagatcaggttagtttctgatatgtcaaatacataatgagcatgtggtgatgatctgcaaggcccttgagataagtggaatttcctcatttccggagtcccagggcaaccaaaaagaaaacatctttgtccatagatacaaaacacataggacacgtagtcaagacatcaggaaacaaggcagaaggattgcagcagttgatgaccacagatctattccacaagaaatagaaataaaccgaacaagaaaaacaccgccgagctatgcaaacaccgtgtcagatgccatctgacgttttcccgaacgccaaaccagagacaccgaaggttcagatagagagcaccagaagattattctgggctaaagcaaagacaagaagaaaatgatatgcagagaaaatttgctttcagcggaaggcgtaagaagggcgaaccattttcgatacttctggatttagagagagctgctggtaaggcgagcttcctgggtcatagtacaggccttcgatgtgtccgtcctcacggcgaagagaaatgtagtagaatccggaaatagtaagaccttgacgagcatctgttggggtgatgaagcatcgctctacggcatgttagcaaaaaataaaaacatacatgatctttcgctacttacccttccatctcatcaagatccatccttgagacaattcctcggtaatccatttccgattcacaagattccgggccatctcagcatctgtcagatccttaaacggctgcagttcacgccagtatgtgctatcaatgtctgcatctgccttgaagttctttgtcgccagcgtgtgattgttgaaatcgatgatctcgccctccaagaaagtcacaatgtgtgcgtcgtgggtgggcgaggtcttatcgggaatgttgtaggcctccatagtgccggataatgtcatgtcctcgtggttgatctggtgtatcgtgaccttgacaggccaattttcatcacgattgttagctaagtatcggcggccacttgtagtagaaacgctgattcgtgcactctcacttccatttacaatgacaggctcactgggggcgttcggactagcaatacgctgcgacaatattgaacacccggcacttgcagctctttggcagcctgaaaaggccattccagatcgaagccatgaacactccgcgggtggtgcgatgttgcgagtgtacataatgaagttcgcgtttctccaagatttgctatccatcgagaagggtatccgactgtccaccaagacacgcatactatcttcgagagagtttgaatgccgaatgcgctcgagatagtggatggtctcccctaacacgttgcgcatacttgtgtccgagtgtagctggcgatgagcggcagcccgagcgcgtaggtcgttgtgggtgaggttggtattgtgtgggtcaccgcgcgtcgtaggacggtagcggtatccccgagatgcgaccgctgctgtattttcagcgtcctcctctggagtgatatctgaatagcgatcgatgatgtagttctccagtgtgcgactcctcgaaagccggggctgacgccttgcagattgtaacaaagccgccactgcagagatcgatgtccgagcctggttactacgcggtaacgtcgcagaatcatgcggcatcagttgcgcagggcccagggcctcattgcgcggaggtcgtgcggggggtgggtcacgacttgagatagcactgaggaaaggctgcatctgatcgtcttccgactcttcgcgcgcagcaccatcctcgtcatcagagccgggtgcccatccatacaacgaccgtgagttgggcattcggccctcgtagttcggcatgtcggttgatctctcctggtggcggacaatagggatgcgacggttgagttcaacagacgcgcgcaggttcgtgggatcatccacctccatgcggtcttcgttttgtggtggcggattagtcggataacgacggcgacgttgtcggctcagggagggtaatagcggattgaagagagctggtcgcgatcgcaggaagttcacgttgtcatcgtgagcattatcggtctccacaggggcaggtgtgggaatcgacgatcggcgcggagggtcaggtgccgcggtcgtcggggagagtggcgtgccgtactaaaagatattagttcacaaattatactggggtgggttgcaaggataaaacatactgggttaggaggcggcattctgatcagaatgcgccgtcaaggggtgtgcaggatcgacgttggccatgcaaggccaagagaccaatatatgtgtagcaacaaacaattaagtccggggaaagatgtccacgaatcgcctgagaaagtgtcggatgttgtgcttctaggactttggggatgtggagaggcccgcaacgtatgacgttcttcctttcaaccggctcagggcctctggaagaatccgtggacttcattgaacttcatagggattccaagttgatttttacgtattcttattgaattttatatagctgagagtcaaatcccctgaaagccaagaacgtggagccccctgttctgcaaaacaaacataccaaaatggtgtgatctatataggtcattcaaacccctttaaatgaagaacaagcttacatcgagcttgccatatcctagcgattaaacctgaatggctctccatgttggcaacccgattcttcatttaaagggaaattgcgtttagggggcattggttacctcctattagattgcctgtcgggttgtctacgggccaaataaaggctttgataaacaatgcatatggtcatgagtcagtatctaggtactaagaacaaagaatgaaatttctcggagtacagcttgtgactatttggaaggcaaatcctgatctacagtctccatcaagatattgtcctaaacagtggagctctatgtgcaattgaggatctaaatcacagtctaaatattaaccagaaccctgaaaggatttacagaccatctaaaatgttgcaaatcaggccacgcgtgcagcattgcaatcatcggccagctggacacattgtaggaccatgttccagaaagcatctagatcaacacccctgggaatagcaacacccggaccatcaacaggagtagcgatcgagcgccccagttgacctgtaatagatacatctttcccgtgctttccatcggtgacaatactcaaagcaaaacgctcgccgcctttgtcatcaaaagcgagagtttgattggggtgcacgttggcaaaggctgggttcagcgtcgacaggatcgcggccacagcaaggggatcatgcaatggaggcccggtggtcaaaccaaaggttttctcgtatgtggcagcaaagaaagtgagtagcgcgtgcaatatctgccgaaggatagtaggatcctcggccgagtggatcgagccatacaagatgcgcgtttgaacagcctgtgtggccaagacctgatgtgtgagatctaaagccataatagctgtcttagaagcaagaactgggttgctaaagattgactcagcagactctgggtcacactataataccatcgtgattagacgagccagagaaggatgaaaggttttgcgaacgtacatagaagttgaactcagcccatggggtcacatttccgatcctagccttctcaccaggtagtctactcatgggggcatcggtgaatcctccaccaatggcaccacccataatgctcagcccttggatgtgttcagctacctcggggaatgtggcaaacaacagtgcggcgttggtcaatgtacccgttgcaaccagccaaggagttcctttgggttgtgcaagaagagcatctctcatggccacaatggcgttcttatcggtgatgggtgctctagtggccttgggaagaaggtcagtcccatcaagaccggactcgcctggaaagtgttattaaaacattctgctcctgatatcagcatcaacttaccgtgaatatcaggtgcatgaagagcaggccgtgaaaatggcttattgctaccaggatagacgggaatgtcaggctttccgatcgcttccaagacgctgccggcattggcggttgtcttctctaatgatgcatttccatggacagtactgattccaagaagcttcaaatatgggtgatgagcggcgatcaaaattgcaaaagcatcctgtatcgtattaacaaatgtctctctagaatttctttgatgcttacatcgtggcctaagaacagtcagtaataagaaggcggaaggaacatgatagactgaccaggatcgcaatctaaccacaagggagtaggactatattgattaacttggtctaacatggtggataccttagagcaacaaatggaattgaaaatcaagaggccacttgggctcttaagtacatttggccggacataaacagatccccgcatcaaaggagggagataaggcttatcttgaagccctaagccctatggtcccaattgggtcgatacagattatcaacgcttctaatgtcgaccttactgcttttaacagagaacgcttttttccttgatatgtgttgaaccaactctaaacatctgtgcgatgaaatgaatgatccgctccgccccggccttcagccgatatctcatcttaaggctgggccgacaacctccagctccagatccaccgcgctgccttccccaacgacgcttcagcctccttcgcgtccttcatctcgactccgtacacaaagagatactggcaaggatgatctggactccgttagtgacaaggccaccaccgctctaatccgacgcgttctatgcccccagacaagcagccacggagcatcttccccacagcctccggaagagctgttacctcccctcacgagctccaatgacgttgatcgtcaactctacgcccttctcgccatcataataaaagaatttgtttactcgtggtactcgaagatcacccccgatcaggctcttgtgaatgaggttctacaagtaatcgcgcattgcacgcgtgcactcgagcagaggctgcgccaaatcgacgttgcacaattagccctggatgaaatccctagcctggtggaagcacatgtaatctgtgagacttgaccgttctaaagtccctcttgtcggaatccatagttgttccgagaaacattgctgactatgatcttccagcatacagactggccaggcaacagtcacatctttctggtctaccgacatcataccgtacaatctatcatgagctaaacccacaccctggtctttctccagtacctgatccaggagatccagatacaatcgtcgagcagacagacaacgaagcggtctatcgccgactactcgccaacggtatcctagcagttcttcttccaacggaagatctcgagaacagcagtctccgggcgcttgtggttgatatcatagcagacctcattctaggaaaccaagtcagtggcagggcatgtgaaggatggttcatttgggaaactatgggcaaactcgccgctcaagtgggacaccgtcaaaaccaagatgacacaaaatctgccccggacgctggaaccaatcgactagaaaaattcggcttgctttcaaccgaagatgagcagctcccggaccagccaccggcgtcgttctcggccactgcttggatatggaaccttctgcagacggtttatcttggttacgtcgtcttgcgtttcattgcgataggcttatttcgtgttgcatcgagtccaggcccttcttcgcacggtgttggtgtttcacctgccttacccatcgaccaaaaaagagatgggatggagtcgtccgatggcatcacacgtaggcggccggttctcgactaccggatgtatgccatgatttcgcagatcctgggactctcatggagaatgccatggctgagtggattgcttgccctatcccaataccttattttggcaggcccaggcagggtcggcgctacggacggaatcttagataggtaagttcttgttctattttctttttctttttttttctcagtctgctgcttctctctgcaacccctcaacgccccaacactcgagggctcaggccttgggaatcaaagactgtggagcaacggtacgatctccgaaacgcaatctacgggtcaagtgtcacttgtgcgagtcaaggtgggacatgaagcctcttgctcgcatgctgcgtcggtcacttgatctgtaaccttggaaggctgcaattacctgtgcgagggattacggtcatcttacgaccttacgagatctccttactgtacggtcattaccgtcagtcttaccaggctgttctggcataggattggttgccctcaaattggcccgagcgacttgaatttgtcaatcagggatgtctgtgggctgcccgcggatgccccgtctctgaatctcctttgagacagaaaaatcctttgtgtgtgatagcgccggggcccggccctttccgtaccgctcgtccacttttgtgttggaaatcttgacgattgcaacatctgccaactttcaaagcgcttggtttaccaaacaaagaaatgacatcgcatcctggcaagaatcgtgcaccagcaaaaaagagaaagaaaatgcaaaaaggaaaatggggccgatcacccatcggtgaaagtgaactaaggcctcttttggcgcaaaaagaaaaaaagaaacagccccagtcgaggctagtgaattactggattcggcccaatgagcgaaattcctgtcgggaaggattggaatttgtaagctgaccgaggttggagcataagcccgcttgtgctccaggtacggagaacgctgccgggatgttacccgctgaagaggtctttttctctttgacgtgcgagaaaatgatatcccagtccttgtcctggcccaagctccttcatctctgcctaggccgatcatgctccgcctcacccccactccatacggccaatcctgatttgatggcaacttcgacttttccttaactaaacatgcgcgagaaggggaaaaagccacaacgtcccggggagctccacagtcgagattctttcttcacttttttttcaattaatttattatcttttttgggaatttgctcaattgctccgacgtcatgacttgagagagacctttgctaactgctacagattcctccgggagactatcgaggagtacgtgctgacccccactttgttgcccaaccttcttattgtaacaaggaccgccttgttcccggccaatacccgtccaatatctcagatagcggctgggaatattgaagctccgtcctcggctctgcagtcggtgcagacctcgacgcccattcagcaagccttcgcacccacggtctcaaatactcctattgtggaaggagtcaggggccctgatgccggtatctttaatgaaaccaataatgcgggtaacagcagcaacggcggcaataatgggaggggtacctcaacatccacctcaggccgccaatcgtcactttctgccattgcagccgatgtcccaacaccatcagagctaaatgacccggccgaaaccgtaaaaaggaacggcccatctaggacggagatcgccgctatcaagcgacgatgtgcagctagtctcctggccgttatcccgcgctccgtcgtacgaactttccttggtgttccctcgtcggcgcctccaccgcattacagtagtgatggtacctgcagcaccaacagtttgccccatctcgttacgtcgtccccaccaactcccccaagggcgccccatgaatctttccaggaggggaaggaaaatctggcgccgtcgcattcgcatttgccttcggacccctgtccacttgcatgtagtcaacttgccgctgagcggctgcgcacagacgatgatccgtctgcggggattgatcgcgaggaattacatctcctagacacaatcgagaaagactttctagacctctttgcagatgagtactgcaataaacatctagtctggagcattatcgagacagttctggccaaggtactccctgaaatggctgagcgcagtgttgaagatttactggaggatcgtgggatagcgtcagtgccgcctgcatttgtatagagtacatatagtttgcggctttgttattatcagcagaccttaattgatgagatatgccttatgactagcataacttccaaactcaaaaatagtgtgattgtagaaagatatcgggggtataatagagaaaattaatctgacatggttcatctataggcgaaccagaaaatttcatgtcctttccgcgtgagcagcccagttttttagaaaaaagaaagggaagaaaattggtatgaaaagagcgtaagaaagagattcagtacaatgtactccgtaggagatcaaggagaacagaatgctagagaaaacaaatgacagggggggatatagaaaaccaacagcaaaagaaaaaaagcaaaaaacccgaagaagaaagcaagcggtaaaactcccgagtccaagtccgaggccgatgatcccaaatccgtataccatcacaaattgccatttgtccattattccatatgcatcgtccagactgggaataccagggtatgtgtgcgcctataaaatccatcacccaaaaaagttccaaaggaaagtagaggtcgccctctggatatgtgtatgtttttgtttggttgcccaggttttatatctcgttgccatcgcggactagagaaataagaaatggatataaagaaaggttccgtacaagtgatcaaaaaaaaagaataacagagtagcaaaagcactagatgaaggaaaggaagaagagaatggggaatcacgaatcaaagtaaagcagataatgttagagggggaaggagggaatgcctcaagaagaaatgaaactagcagtgcacaaagacagtgggggaataatcataaaaaaagagacaagaaatgcaaaatccaacttgcgcaaggactcatcccaaattgtggatgctccgcttcttcgtcacatgcgggatatgaatatcctcatgttcatcaatgcgcggcaagccactcaacagaaagccagcctggctcctggcaagttcaagcctctccattagctttacgatggtcatgtactcctgtgccgccagaccagcaggctgatggtcgaagtagttgatgacgagttcaagggcgcgacgggcctcgtcctgcgtcggtgatcctggagagctgacgggcgagatggtggtagactttgaccgcggcggcatgtacttggtcgtgatctcagggttgctgcgattgcgcttgatgacgtttgtctggcggaccgggaacatggcgggcttggagtcgtccatttccagtggggattgcagggtggagaccgtaagagattgctggagttcgcgcttttggcgatgcgggtctgtggtgtcatcggctgataggagggttggatcaatggggacgggaggggaggtctggctgtgcagtcggttggtgtcgctgttggtgaacgggagacgggattggctcgttggtgttgttgggctgaccatacccgccgaagaagtgtcgagtgaggttgtgctgttggaatatccgtgttggtatccccctgtcagatcgggcagttcagccatgtcgtgtttgtttctttcttggctcgttggggacaatggggatccaaagctatcaatggaggatgtgggcgagtggctgccagggcttcgaagagcagacccgaactctgtattgagctgaattgggctgtttgaacagctacgaattccggtagatcctctgcgcatttttgcgccgaggagattgttcttctgcttgaatttttctagccaggctgcagtggagaccttttccttgccttcagggcagccgcagatactggcgaagaaaagtgctttctctttgatcatctcatcgcttaggggatgtccttggctgtggaggttctttgcccagttggatagagctctctcaatatcggggactctgcccttagcccgtttgataggagaccgactcccatcttcagggtttagatacttttccttctggcgaaggactttggaaacagtgctgtatatgttagattgaatcaaataaaaagcgaggtcgaaatgataccttctctcgactccaaacaacgctgcacatcaaagtcaacctagttcctgaacacagacaaaagagataatgcttacctccaatatcagtctgctttgcagtcttgttttcctcatgatatatacacatttgccggcgatcatcgtcggtaagtgtcctgcgcggcgtagtccctccagtggaggtctttcgcaccggacacatggtagccgaaggtgacaccgatgtcggggtggtagaagcaggtaatccagacgcaacaaacggagagtgtgtcgtgagcatgctaggccaggaatgcgaaggcatgggtaggggcatggaggcgtagggcggcggaactgacatgccatacgagtccacagccatgagctgcgatgagccgtagtcgaacccactatattcgtgcatggggggcgagtgctgaggagaagcaaatgagcctatctccacccatggcgaatgggggaattcgctctctggctcatgatgagtctccgtttccatggcgggctcctccatggacaatggatctcaagaacaatggaggtagggctttttttggtggggttttggttttcgtgataggctcgaatcgggaggaaatcaaagaaagagagacaaacgagatctcgggaaacaatgaaacaatctaagtgtgagacaataaaagctgatgcatgttccactgcttccgtagacctatatagaattgctctgatagagagtattgtcccgagaaggtagctctatagaccacctaagtgaagtagaagggaagtgtataaagtatacaatctgcaagaaggtaaaagagcatgcgagtaaggcaatgggggttaaaaggaaaattccttggacgatcatatcgcgtggatttgacagaacgacagtgaatatcaattgcaactggcacgagaaagaccaccggaaaaagccatgataacctttccccccgagagttatccagcaacccggttggtgattggtcaatacagtgaaaagttccaaccaaaataataaaaaaatataaaaaaaatataagaatagccagaataatatctcgattttaatatttgctcaatttcaaaatcatccctgtaaatagaggaggaacggcgtctggttggttggccgtgcgatatattgcggcaggggttgcatctcgtcaggcccaatgcgtctggcgtattacggtgtaaaggtatggaaatcttcgttctcagggctaacgcggtttgttcttgttttttttgggatttgtgggatcttttttttttcttcttttcattctcccgtatgaccttccaaccaggatggcagactcgacggtaccgagtacatatgtatgttatatactggcaatataacctggcgctagctcatgttgtaaaatagagatgcaacagcgcgaaaccttgaccaatgtctgaatatctagttggtccctcactgtggctggccgttgtcggcctcgccttgacgaggctgagggtctcatctcaagaaacttgggttaaatcagggttgatcatccggagaaggacggggttcgttcaaagggtagcccagtttgtagctcgatttgctgggagccgggtagcggatcgttgaaccgctcaacctaaagcccgcttgacatccatgcacatcgtatgcgagaacggcgatcagagtggaccgggaagaggatagcggcaggcaaactattgattctgcttccgtgaaaagaatcttcattgggaatatcttcattttggccaaaaagcaaaccgttgaatcggagactcaacattcagattcctgtccctatagggtatattgcgaggcaaggttccgactgtggaggtgaccaacccggatccgggggtcttaatctccagtaaacacaaatcataaggtgaagtagaccgagagagagagcaaatccacatggaatagattgcacggattgaacagagtccatacaacgagggaaatattaccagactggggcagaattatgtgggcaggcggatcctaaccttgggagttcggaatatcgaccgcatcagacatccacgagagctgacacggctagaaatgaggaagtgagcaataggccgatcgttgggtggacgaatctgctgtctccgttgccatgctgttgatacgacggggttcatccaatacaagggccgaacagcaggttggatagtggtccaatcaccgggcgtagaaggcatctcttggctgtgaaaaagaggggaacctctcccccatttgccatgcggtttcggcgctaaaatccagccctcgtctttctccactacgacccactgcggtcccctccggcccgggaaccttcaccatttccttgcatcttgcatgttgaacattgtccaattgggaaggtaagggctagaaacagagagcagatacagactatagagagtatagagaatatagcagttggggaaggagtgtagttgactatcaaggtggtaccaaggaccgtaggacggcgggcttctacaacatataatacgctctactatagaacaggtattctcatttgagcggtctaggtagatggatactacccaaatatccagcaagaccccgcttgttcgacttaaccacgaggaagccgaatgtgaaatcagcctgctttatttgggcacttggaaggattcgttctcgaaacctgccgggatggaatgcgtctggaagacagataacgtagcaaaagcaaagcaaaaggtgactagggaggtctgacaaattaatcccaacactgaagaggacttcaattggtacggagtactctcgcttatttggtcgcagtaccaatcattatgcttgctgccgtcggattctttgctttgcaccagttaaatgagcggaaacaaaagaaatgtgtgacaaaattcagaggattttaattctaccacggattttaattagacggaaatcgcgtcgctagtaataatcgggtttttaaggaaaattcggggtagatccagctggcctgacgccattggagaggttttccgatctttttagggcaagggcattactcttcattattcccactactatgtcggagaaggagcaggaacaagtctagaccggtcaacattgaaatcctcaggccaattcgtatctttgcttcttgcaattggatctgtcattcttggctgtcattttcaagcttcgggagaaattatctgttaccctcggggtacacaaccgtagggtaacaagggtcagtgttacttgagtcaggtaccgatggatatacctgttgcaattccaatcctgcccgagatatctccggaaagtcgaattgtgcaaaataaatagaactgtgtatagaaaatcaatggtggatataggggaatatggcatggataaatactactctcgcttgaggtatgtgagtaacacacactagtagctagcaagatactttgtactccgtataccatacaaggctaaggaaaatagagtaagaatgcttcgctactctggggaagagcatggctcatgcaatgcaatgcgacggggatgtccgatggatcctccacgagatcacaacgtacgttataggctacacgggcggtcggtgccctcatagtcacctgatgaagaggttaagtatacataatccgtacaccctcgtacgccgatcgtgcatctgagaacagaccagatcgtgaacagcccctttctcgttttcactgaatcggcgatatgcggtctccacctcactagaactattttgtgtcgccgcagagattcacgagaactactcagtagcgtactagacttagtagacaccataagaaccccctgttgggtaaagtcatggacttcgtactcgtaatactgtgtattggataggaatcgatcagataaacgtccgcaattcaaccaatatgtctctcattcaccgcttgttcttagaatcatttgtaccttgcctcactttttgcttttttctgtttggttgaaatagtttggttaatttgcatttcgatcctgcgcagatctgtactccccccccccccccccccccccccacccccacagcgccnnnnnnnnnnnnnnnnnnnnnnnnnnnnnnnnnnnnnnnnnnnnnnnnnnnnnnnnnnnnnnnnnnnnnnnnnnnnnnnnnnnnnnnnnnnnnnnnnnnnnnnnnnnnnnnngcggaaaaattttccccccccccccccccctcaatgtcggaaagtagttgcaggccagcagccaagagattagaagctaagagattggaaaaacgtgctagtcagttgacagatccattttgatcttccccctatcattctcgagcaatatactcccttgagcctatcggaagccagactagcattgccgggtttatttcacatgtaatggttaaccgaaactcttgtggctttcgaatactacacgaaactttgtcatgctcgttaagctattagcattaggtcaatgcgttgtgtcgcggcccttctcttcacggaagtatagtatgcacaccataattgccttcccggctcttccgtcgaggctatcaacttcgttttttaccggggcttttaagctggcagctatcccatatagagactatgatcggcattaggcctaggcctttcggggactgactcgtcggcctcgaaagtaaaaaaattgggagacaagaagcaatgcgaacaaagaaatcaagccacaggcggagatcttataaatattagaattactagcaaggatgtttgcggcacgggaagtaatggcaaggggaacatgccaatcggaatgtcatcaaaataaattgttatgcagacatcctcggatctgtacatggtagggtctgttaggtccgggggcgataaggagtcgcatgatgccacatcaatcttctattccgtactgaagtagcacgacttggctaggaactgattggtctgacatcatcaatcctttatacggagtatgagaacgcaatttgtggctttcatcaggttggaacagtaggtgaaaacgagcagactgctttgttgtatattggcttttatttccacacaaccataaaatatttgaacttttgcgctcatgaaaaaaatggataatcataacaatatggactggtcgcttcaaagggccagaattcccaaaggtgccaagaatatcagaaagacccaatggccgttcgcctcgtgcgtgcccctgggctggtgtaacccctgaagcctaactcgagctcatcaaatcaagtcaagctatacctcaagacgcaagaccaaaatcagcaaggctatgcatgactgccgattttgatgtccaaaggtagactcaagactttcccctaattatcttgccgtgaacgagtctatccaaccacgctcggatccggtggcgtacggatgtctcagaaacctgtcagatcgcggaggcgtaaagacatgctggcacagaccaccccagcgcttggatcatctcgccgcttcgggctatgagtgtcaaggagttggcataaatcctttacctcttgacgatcgacactgtagctggtcagctttgaaattcatgttgagttttgttcttttttttggtatatttaccgatatcttcatcaccaagctcgtgggaaagacccactcgctgcggctgatgcttcactgagcggccatacacgatagcatgcttgaaatcgtccttgattgtgcggtgaatagcgtcacactgtttcgttagtatgattcttagaaagatgagggcaacgcttacgaaattctcgactgtgcatgcataagaacgcagcacaacaggtgctgaatagtcgggcgctctgcccttaggcttcgtgtagattctgcgcagcttgagcttctcccacatcatctccatcagctcgtcgatattccatccatgctccgagctaattgggcaggcgtctggaatccggtacagcaaatccaactcttggatggaaatagcgtcgatcttgttcagcgcataaatgacagggatgtagctgcggctcttggcttccaagacatcaatcaggtcgtcaatggtggcatcacatcggatggagatatcagcggacgaaatcttatactcgctcattacagctttgatttcctgggatctgttaatactcatcaaagaccaaagactctctgggagatcaacttacgtcgttgtcaatatgagtcaatggctgagtgctcgtgatggcaataccacccttgtccttcttcttgaagacaatgttgggaggcttcttattgatgcgaatgccaaagccctccaattcattctcgataactcgcttgtcaaccaatggcttgttcacgtcaaggacgatgaaaatgagattgcaagtcttggccaccgcaataacctgtcgaccacgacccttgccgtctttggcaccttcgataatacctggaagatcgagcatctgaatcttggcgccattgtacatcacttgaccggggacagttgtgagggttgtgaactcgtaggccgcggctagatgggcgttagagaaatcggttgtcaaggagggtctttacgaaccttctgaatgttgaccagtcagtttattcatcagtgtactcttgccgacggacgggaaaccaatgaagccactgcacttgtaagcgtatgcgatcgcaaatcttctcgggtaacttacacactggccacaccagtacgcgccacatcgaagccagctaatctcaagttagcacttagcagagtgttcagatctagaatactcacatccaccaccgccaccacctccagttggggtcagaagttcacgcttgagcttagcaagcttcgccttcagttgtcctgcatattgtcagaagacgtcatcggtgaaaagtcgtcggtgtgcgcgtacccaaatggtaagaggtgttcttgttcttttgagtccgagccatttcggactcgacctccttgatctgtacaaaatcattgttagtaatttgtttgatgctatgctcaaaaatctttgaccgcactcaccttttcaatagtggtcgacattttggcgatttgacccagcaatcaaaaatgaatcgaagaaaagattggaaatcctagtaccgagggactcgatatatgtcccttaacagccagcgagttgagcgacaagttttgaagaaatacacttgcgacccgtggacaatcttgtggcaccgcagtttttagtcagggcggggtgtgcgcctaaggcgacgagggcaagtatgtcatttccagcctgaggcatcatttcttatcgctatcgccaaattgcaacttgggcaactacatacctccagggctaggtaggtactgtggacattgaattactctacttggcctcaaatttcataatgaaaatacacggcttgtgtatactcatatcctagtttgtatctcgctgtggtggaccctcgatttcgtcattcggccaacttccgataccgcttctttgctacatagactttatcccaaacgcgcccagcacaacgctcattcaatatgccattcctcaacgggtctgagttgatcaccgagaaacctgcctttgagaagctcgtggaggaccttagttctgcgctgggtccaagttcgggtctggattctagcgatgtcgatcccatggagatacagctgttgatggagaaatacgtctcgaattcggatgaatgggcttcatatgcattaggtgatgcgagtaggacatacacaaggaatctgattgatgagggaaacggcaagagtaatttggtatggaaaatgtctccctccaaatgattacttgactaactcgttcagctgattcttgtatggagccctggaaaaggaagtacaattcatgaccatgccaacgcacactgcgtgatgaaggtattttttttttaattcgatacatgagtagaagctgatttgaaacaggtcctcaagggcagattgcaagaagatctatactcatggcccgaccaagagcagatcgagaatggccgaagctcaccacctcagctcatcaagcagacaacctacagcgaaaaccaggtcacctacatgtccgacaagcttggtttgcatcgggtatccaatccggaccaggacaactttgctatctcactccatcgtatgttctctcgtgtcgaaatgaacagaatccagactaattgatcagtttatacaccacccaacgccgcaatccatggatgtcgcatttacgatgaacgaactggcaaggccatgcacatcaagcagaccaactattattcgttccgcggtcagcggctcgatgatggacagaagtagtcttgtcgatgcccgttatcaataacgctcattgtggggtgtttaccttgtacattacctaagtttgccgaagtcatagcccctaatttggtagctgagactgttcccttcggatacccctcttgtactttatgttcaattacatattcttctccggcttttattcattattgaaaggcgttctgcggcgtgattggcaaaggaaatcttatttctggcatgtcatttactgggacttcttggatttctgtaattttttttttttgcttttggtcataactctattcagattcagaagaacagccactcatatgtaggcccgcttgctctacatgaaagcctcaacattcagctctagagtactgactgggtacttcaactcgtacttctcgagcacggtagggtgcagaataccgaaggagccaatgacctggtccttgccaccaatacagacgtggatggaagcagcgtggccggggaagtaagtgggatctacactgttagcgaatttcttagtctgtttcgaggaggtacacaccgtctagttccttgatataatacgagtcgcccgtaggggtctcgccctcgacgaggaagttggtcttaagcatggccatgatacgatcaagaagaccgtggacaatttcaaacccgctagttttaccatagaaggcagcagcaaagtgtctctcgttgcggctcttgcgctccagggacagatccttaaaggcaacatcgctgacctcgaatattttcatgggaacagagtggtgcttgttctcacggatggtcttgagcagacccgggagcaggctggtacggaccacctggaactcaagggtcttggggttagccagcttgacagcggtgtttccgtcatccttgcggttcagccagccaaagttctcatcatgcgagcacagaatcaacggtaacacctctgaccaaccggccatggcagtctccacacgaacaatgtcggaaagcttgttgatagggagaggttgggcgactgtgccagagatgttggggaacgcacggggcagcgagttgaaaccgtaggcaatggccacatcctccatgatatcacactggtggagtacatcggcacgggttggggggatttccacattgatgatgtctgagacagtggtagaaggcttggcgcggaaggccatctttgtgagaagagtacagatctctgccgaactgaggctcaagccacagcactggttgatgtacgagacttcagcctgagcgatgcggggagagatgtcaggggtgacgcgagtctccccgttatgctcagacacaatctggacaggctcgatggtgaacggctccaacgtatattgggagaacatggtgaccatcatcttgttcacaatatccagctttgtcttatcgagagctgtgatctcaattaaaacattggtggtgttcaggttgatcttcgagtgatcgccgttgataatgggtggcagagagcaaacagtccggtcggagtcgtagatgactggatagactggagagtcacgaatgatgtgtaggtacttgcccaactgttggtgcttctcatagaagttcatcaattcctcgccatccatctcctgggtctggttcaatgggacaaacttgatatccttgggagggagagcctcataagtgaaggggcccttcacggtgtccaaatcatgggtaccgattgatacaagggttcgttgccgggccaagttctggtggagcttatcttggagagcaatgaaagacgcataacgagcctggtcgaacttgatgttccgtagaatagcgccagctacgtagggtctgattttcgtggtctattttgatcagcggagcccttccacctgagcagagtaggtgttgaagtactaacatcttccttgacaataatccgctccatctgtgctggctgagtcaacttgtactcgggcaggggtttctgacccaggaagatgttcaacatgagcgcaatgccctcgaagcacagcaagtcatatctgatctcttcttagtctaggttctttcatttgttctcctcggatgtcacgcgtaccggttggcggggatctcaatcttgagttgcggaggttcttgctttccatcgacgatagggcggtctgagtttgtagtctgaaaagatcagtattggctatgtgtggtcgggtcttggagaatgtacatcttcgtcgagctcgattcctattcaaagtcagtcatgcccggcaagaatttcccagccaacctaccaaattcgaaacacagctcatcaaactcctccgtggtgtaactgcagcaaggtcagtagagttcaatgacaaagtccagagacgtactctcggcccaactcttggaaaagagcggccttgtcgaccgagatggtgggcatggtgggggttgctgattctggtgtcaatcagcgaaatgtccgataaatcaatgcggaaaccaagtaggcgactccgacagaatataaggaaagcccgtacagaaatccaggaagtagtgatcggtgcacaaagtattggatgactcttgcgctggtggaaattctgcccgcaagccaccaccgccacagatccccctcttttgtgacgatggtattggtatagtaattcccctccatattcaaatgtttgtgcgtacaccgccagtatgtaatttacaccagtaaacactcaaagctcgactgccctgctctggttgctgcatcatcgaagggggcttttttccttttctctttacgaatttgtatcaaatctattaatttgctgatcaaggtactcattcaattctcgaggtatgcttctgctgaaggtgtccatgcggccccaaacccccgccctcacgctaccaccattcatccccttgccatctcgcgaagtcggaactaatacttatcagccatcccattgcctcctacaccacctctgccgaatcgctgtcaggtccaacaccaccctcttctcatccaggaccgggactcagcgtgtctccttaatacatatccaaatccacaatggaaggccagaacgagaacgatgagctctaccccatcgccgtgctcattgacgagttgaaggtagatctccctccagtcatacagacagtattgagctcacatttctttagcatgacgatgtgcttctcagactcaatgccattcaccgtctatccacgatcgcgcttgcacttggacccgaccgaacccgagaggagctcatcccatttcttgatggtttgtccagtgttcaatcgcctagcagccccgtctaacagtaatagattccgtcgaggacgaggacgaagttttgactgcgctgagtgaagagctgggtaattttacagaatatgttgggggtccagaacacgcgcacgtcttgctctccccgctagagaatttggcggctatcgaggagcccttggtgcgagagaaggtaccacaccagctgaaagtttcttgaggcgcatgctaactttacaggccgttgaatctctcaacaaggtatgcgaacagctttcagagagccaagttgaagagtattttgttccgctagtcctccgtctctcaaaggcagactggttcacttcgaaggtctctgcgactggtctttactccacaccatacaagaaggctactccggcgttgcaacagagcctccgacagcatttcggggctttggtacacgatgaaaccccaatggtgcggcgacaggcagccaacaatctggccaagtttgtcaaagaaatgcaaacccaggtcattattgatgaaataattcccttgtttcaatacttggcgagcgatgatcaggacagtgttcgtctgcttacagttgacattcttattgcgatcgcggaggaaattcccaaagaacaacaacctagccacggcgtcttgttgacttcgctgcggaatctgttcgaagacaagagctggagggtccgatacatggttgccgatcgatatgaaaaggtaaatcgcctttgccgaatttcagactattgagcgacactgatgtatgcagattgccaaagctgtccacgaagaggttgtcacccgtgacatggttcctgcctttgtcaagctcctcaaagatacagaggccgaggttcgcaccgcaattgcgggccaaatccctggtatgataccctggttatatatagttgatacatgactaacacattcaggcttctgcaatttgatcgatcgcgacactctcctcaatgagatcatgaccagcgttgaagaccttgtctccgatccctctcagcacgtccgggctgccctcggtactcagatcagcggcctcgcgcctattttgggcaaggaggagtaagtatcctgcttatctgctagcaataacctatactgaccatccaggactattgcccatctactccccatgtttctccagatgcttaaggatgaattccccgacgtccgactgcacattatctcgaagctcgagcaagtcaacaaaggtaaatgctgtccaattcttttaaaatgtatgtcttctaaccctttacagtcattggtatccagcttctctcccagtctcttcttcccgccattgttcaactggccgaggataagcaatggcgtgttcgccttgccatcattgaatatattccactccttgccagtcaacttggagtcgagttctttgacgagcagctgagcgatctttgcatgggctggcttggggatactgtcttttccatccgagaggctgccactgagaacctgaagaaactgacagaggtattcggcgtggagtggtcaaaagcttctatcattcccaaggtgatggccatgggccaacaccctaactatctttaccgcatgacgacatgctttgccgtttctgtaagttcactttcttgctacatcagtcaatgctaattgtcagacccttactcccgttgtcaacctcgaaattattgagaactctctcctacctattctggaacgcctagtgacggatgaaatccccaatattcgcttcaacgtcgccaagtcctacgccgttctcatcgtcacactgcgtcgtctgccagccgataagaccttagttgaggtggagaagtccgaagagcctatcgcgccatcaccccggagcctggagttgattcagtcaagagttgtgccaagtttggagaagttgcaggaggatgacgatgtggatgtccgatactttgctacaactgccggtggcaatcaggatgagatgcaaacctctccttaaactatgcacttgttcggccaatacccaacaagacattttgtcaggttagagaataaccaagcgtccttttcttccaggcgtttttaatgtagagctttcacataacgtttaaccagggtaggtagtcaaaagcaaatgcgcaaataaagacgtgcggtgcatgtaaagccactagttactacaatacagttagtacatgcgtattagagggtaaagagagggctttaagccggccctggctagagtgcgccgggggagcacctgaaccttgtgattcatttgtcagcaaaaagcggcccctgggccggggatccagtccatggtcggactgcttgttttagttatcactggcagtatatcaaataaatttgggagaccaatatcaacatctaaaatatgcttttctaaaccgcagtgcgtctcatcggcatgtcgattagcttgtgatcctatcgagactctcatttatatgactcttcagtcgccatgtcgtggccataccatttcatttctctctcggaaaacgacaagctgcatcgcagggagctgcttgatcttcgcggctattacgcacaatggtcaatcattgttgtcatcgtcgcggttcgaatttttcgctttgctacgagatcaactgctaagtgggatggcccagtttctggaaaaacccgacagtatcttgtctgcgggctgtggctactatggcttctaggcctttccatatggaacagtggtgatggtaagtcttcatcttctggtaagtttgagcaacgagctaacatggaagattacctccatttgaccaaagcattggggcgagttggcctgtcccaactgccactgcaggttctaatgtctccggcatacatctctcggccggcagcctcatctgtactgtctcttcttactggtatccctcagccaacgttgactccgtaccaccgtctctttggtcgggcggtggtctctcttctgctggctcacgccgcgctgtacacgctgttcttcgtgcaatccagccatcctgactttggtatattgctcctcaaacgaatccaagacttagacgtccaatgtggcctagccgcgatattctcggccgtgctactcattctcttcgtgcggcctgcttcccagaagggactccagtcttggcttgtgcagggaaccttccaagaacgaagaaagatgttttactttggtcatgtgtctttggtggtattattgtgtgttgcggcttatattcatgtcaagcaggcgcagaagtacattctgcagactttggcagcttctatgcttaattgggtgtgctcttgggcgctatgttagtgtaggctgggaaaatataacatcctttcaaaaagaaaattcccttggtcaagatctcaatatttactctatggatgtaatatatgagcttgtgtagcatgaatctcattcctgagtgaggtccataggagtttttaatactttttttttttgtacttggttagatcttgtttttctgagacaacttcgatctacatgtatggaatttaaccccttttttctcccccttagtagtagaaacaacaaagagtgagtaggaagttcaacggtatgttgtataactatatagtacatgaactgtgtaccctgatatatattcgatagtggtcaggtttgctactaaatatgtttctaccaatgaattcctgaacgacattcttagttttctgtcgcacgatatacatcgatgtactccgtacggtcgaggaagtcaaagcacatttggtgacacgtatatgaatagattatggcgtacctcccctgcatccgggcaacgccacatactaatagattggccccttggagaattggggccacacaaattaaaacatcatattaaaacatcactgatcgcctttgtcttttagaacgcttgaacagcacatagatagctaattagattgtgacgattacgttagaaaggcttggcggataaggttcactaatagcccgaggccaactctagacttatggagaaccctcctgacgaccttagcctcgctctctttcttcatgcctccccccaatggcagcatgcgcattcaacggttgattgtattacttgcgatcggcgttcttgcctgtctttctctcctactactacgatcatcgaagcactccgagccgcagcccatagatttgcctcctcccgaaccaatacaacaccctcagctccatgcggggcagaacacatacctccccgaaaaggaacacccgatcacgcgtctggttggaaatgcccaacaagatttcaatcatgcgcagtcccggcaatccaaaaccctggccgaggccgtgactgaatacaagcgtcgctataatatgcacccgccgccatttttcgacaagtggttcgagtttgcccagtcgagaaatgtgcagctcatcgatgatttcgataccatctaccacaccctcctccccttctggggtgtgaaacctagaacgattcgcgaacgggcgcgcgagacactcggatttgacaatgcgatgatcggtgttctaattcgcgacggcaaggtgtccttaacggatggagggggcgacgccggtaagtggcagcgagacgccacggccggtatgatgaagtctttcgtgaaatacttgcccgacatggacctggtgttcaacactcacgatgagccgcgcgtaatcctccccagcgaagacctccagcgattggtgcagacagccaaggatttcactatcccagcagcgttcaagaacactccgaccaatgcgtggtccccacgtgcttcggacctaaacaaaggcgatcgcatcgacgaggtgcgcaccactcgtttcaaccgtttcgcacaccaaccgacctggacaaattcccgagtatcttgtccggttaacagcccagcgcgctcgctcgaagaaaatcccactgatgacgttgatccctatgcctatggcgaactcggcttcatctacaacaccacggcggcctctgacatctgcaataccccctccctccgccatacatacggattctttgaccgacccaacgcctttgatgtcgtccacgatctgttccccgtcttttcacagagcaagatctctagcttccaggacattatttacccaagtccttggtactgggccgacaaggttccctacgatactgaaaaggactatgcttgggaggctaagaccgaccgaatgtactggcgtggctctacaaccggtgggttttcgcgtgcgggtggctggcgccgacaacatcggcagcaatttgtcgacaacgtcaacgccttaggcaccactcaaattctcgctcgccagggggacagctgggtttcccaggttatcaaccgagacgcctatcgtgattccttcgatgtcaagttcacatttatcggccagtgcgacccggacgactgcaacgcgcagactgcgtactttggagtgttcaagcaggctgggcaacaagatgcgtgggcgcacaagttcctagtcgatatcgatgggaacgcttttagcgggcggttccacgctttcttgcatagcaacagctttgtctacaagatcgccatcttccgcgaatggcatgacgagtggttgaagccctgggtacattacgtccctctcagcttgaaaggcaacgagtatgtcgagagcatgcgatacttcacttcagaagaagagggcaaaaaggccgcccttcaaatcgctaatcagggtcagcgctgggcacagcagaccctacgaaatgaagacctggaggtttggttcttccggttactcctagagtaaggacctcgtcattccatgagagaattctgctaacttgctcacttttcaggtatggtcgcttggtagacgacaaccgtgaacaactagggttcgttctttgatctgtatatattcccttcgacgagatgatggctttttgtttttttttttggactcctgttaataccccctttcccttggactgtcttctaccaataatatttgtgcatgtggaggtggcgttcggtctgccatagattgagaaaagctgtaaactgcctacaatttacagtgtaatgtgattgcaatcctagatttcatcctgatatcatctaaattatctagattatggataccccgtacctacatatttagatgtaggtacccgctgtcaaccgttttatatcgctgactcaggcgtgacgctacctgtggaccgagctccggttgccacagctctagatttattacaagcttcttcttgctccttcaacacatgattccaatatgggcaggaccatatcccgcgttttgatcggggcagctgtctttgcctatggcttctttacagttattctttacgacctcgttgccttagcgaaaggcacctactttagacgccccactgaaaccgagaaacgagacctacagcttggtgagctatatatgtaccaatcgtgaaggttctttgctgactctccagctcgtgctcgcctgtgggatatatctaaagatttcgaaggtctctctcaccacattctaaccttgcaaagcggattcaagttccattttgttagtaacgatactccaaacacaccgaaaaccgtcaattccgataaaccattggtcatcttcatccacggattccccgatagctgggcgatctggcgacacattatcaaaaaccctgctctgcaagaggccgtttcactagttgcgattgacctcccgggatatggaggaacagagagcctggaagaatataatgcaacaaatgtcttggagaaattgacagagctgatcgtcactctgcgaacccagtatggcgtggactcgggcaacgagagcaacaagaagaggacgataattgtcgcccatgattggggttgtgtcttgtccatgcgtctcgctgccgaagctccgtccctagcccatcggttcatcctgtccaatggaccatcagtatgtcaaaacaccggggaagatgttatctcaactaacgtttcagatcaaattggttgaatctaatatccgccgtctactcttctcgactaataagatgctcggcaacgcctggcgttcaccaatgcatgcccgcgtcccgctgatgcaagcactccgaagcttcacccctctcgcccgccagcttgtcctatccggctatatctttgccatgcagctaccaacgccaattgtctactacctcctgtccggaggcaaccagtcactattgaaaatttgccacctcacctcctacaacaaggacgaatatacttccctcgacgtggccaacagtatggccagcaccatgggtccgtccaccgcagaatcggatactaaaacttccagcggtgatgcctatcctgccaacctcagccagcgcgcgttcgcacatgtcatgcacatggcggcttattaccgtgatcgggcggcgacggcgtcttggaccaagtctattgaaacggtcgctagcttacacagtatttcatccggaaagcgactgtccagcagcggagctggactgtttgacgaaggtcccccgggcgctctcaaagctagcgcaaccattttctggggcaaggatgatattgctcttgaccagaggatctgccttgatgggatgggtgattacttagcgcagggatcccatattgtgctgcttccccgcacgggacattggacgccggttgagcgtgagagcggcgcagctttggtcaagactattgaatgggctgctcaaggtgaagagacagacatcgggacggccatcgctgaatcctacccgggtgttcaggtcaccttttcgcgataaacataggcaatatgtcggacgactccaatattcaacgttttcgttttgcggggcaacccgaactaaagcggctaggcgatgtttcacttagaccagaccgaccacttatagaagatggattccatatatgctttgtatagaagtgtagaatagcatagagaatatcggatattgagtccacgaactgtagagaagaccgaaaacatacggagtacccaaaagagaagtccagcgggatcgctgatttacccgaaaccactccacttcccctcgggagctttgaccttagctctcctgcatcccggcctttgctttcccattgcctttgcttctctcaattccacaaaagatttcttctttacacaacatgctgtgaaaaaaaaaaattcaatctcctgttttcgtcgcccctcgaacctgcggcccaggtaccacagtcggtgtattgggctcctaccggcccgaactttccttggcgattgacaggttaaatatagccccgacagctcttctcagctcttctcgtcttattttggggggtttttcttctctgctccagacttctttgggcgcctgatcattctttcgctgttagactgttggatctgtggcgtgatggattccaatggaggagcagtctactgcacggtattttaccaaccccccccccctatgcgtacggcgtaaactgaccgatgagacagcttctgttgagtgacaattatcttcccggtaagttcccattcatgtgggatgtggaattattctaaatatctataggtgctatggtccttgcccattccctacgtgacaatggtacaaaagcgaaattggtggcactctttacgccagaccgactacaatcgaccaccattgatgagctaagggtacgtacagcatccccataatctcctatacttttggcttacctattagaccgtctacgacgagctggtcccggtgaactcaatggtaaacgacacgccggcgaatctctggctcatggaccgtcccgacctaattgccacattcaccaagatcgagctctggcgcctgacgcaataccagcgggtcgtataccttgattgtgatatcatagctctccgagcccctgacgagctgttatcactggaagcagactttgctgccgcgcctgacgttggttggccggattgctttaatagtggaatgatggttctccgacctaatctacaggactactatgcgctgagggcactcgcccaacgaggtatcagcttcgatggcgctgaccagggtctgctgaacatgcatttcaaggactggcataggctaagcttcacgtataactgcacgccaagtgccaattaccagtacattcctgcgtacaagcatttccagagtaccatcagtcttatccatttcattggtgcccggaagccgtggaatatgccgagacagattgtcccgctggagtctccgtacaatcagcttctaggccagtggtgggctatctatgacagacactatcgtctgccatttgtaagtggcatgaaagactatgaagatatggactgacatttttaggtaccgaccacgtcagctgagattgaaaaaacggcgttggctcaaggtcctgttggagatcccacgagcttccacggcaaatcagtcgagcacgaacactctgctgccgttcctgttttgagtatggtaccgcagtatgttcgcggagaggagcatgtctcaacatttatcccaccatttcctcccgcgccaatcacttttgcgcctcgactgagccacgaaacatacgagccagagattcaaacaccgacacaggcacagctccactatcccagtggccatattcaccaaccacagccgctggtgccgattcgtccaattagcgagtatcaatcgcccccatctccggccccagatgcctcgacctttgaggcgccaacgtgggatccttcacggtgagagcttatccctcggcgtcgtctacaatgctaatatcccatagagagccgccaccggtcaacacgagacccgaaggtattagcttacaacagaaaacctacaatatgtctgaagacacgcatctattccaacccccgtcatcctaccccgaggcgccgaaaaacatgtggtatgaggttccagccaaaccagagcctaaacctactacggtcttcccctgggagcaccatgctccgaaacccacccgcgtcttcgccgaggcacctgtagagttagtgcaaactcccacggtaccatcagaaaaaaagcagcattcacctccaagcgagtctactcctcccggaccctcatcttcttacacccgggtaccatatgaacccagtgccgaatcatggcaaacatacactcgctccaacgcctgggatgaggacccagagattcagcgctatattgagacgatccaaggacggcgcacaaaatcacaagtgaccagcccgggagctcaatccaacagccccggaaaatcacctcccacgccaggcttccaccccaataccaaaattaccgactttccaacagaagtcgagcgccccagtctgcctgtaacgccggccccgatccaccgcaccagctacgggaatgaagcctccggtacagccgctctccctaccgccgagggcgtgtgtagccaggaggaatgggtgggtattacggctgatgtgttctcttctctcctcagtgcaacgtacttattatggcggtttatagaatcccctggctcagctcgaggagctgcatcgtcagcactcggaggttttggagcatcccgagcggctgtctagtcggcttgccgctgcagcatatcgtgagcgttgacagtacttattccttttcttttcttttcttgtctttctgaattttgggataatctgactttatttgttttatgattgactgattaggagatgtactcgatcttgtttgattgttgttgcatatgcatgtgtatggagatttcatgggtgatattttgttatgaaataataactgaagggagcattgaattcttcctacgcttacatttcaattggagatccatttcctaggagatatgaaggaagtctcaaggctttaaattagttatttctaccaaagagtgtgtcgttggcttgatatacgctccagttcgaaattcctgtcacttctgaaccaaagtaatattgaacgattcgatccgattcgaatgtggacatgaaatcgatatcccctcacactatacgcaaagtaggcaccaggtaatcgaggaactcgcacggaactagacaacagatatcgaggctttgattccggtgtatgatacctgatattcaatggcaagaaaagcctctcctggtcaatgtagaccacacctcgaacacctttcaatgcgatgaccaacgtattggccagtacaaattataggattgcgaataatggctttgaaggtcatgtaattttgattgcgtgaggtagagtatcaggttaggttaggacagaaaaaaacatttactcctgagcgaaagtctccgcaccaccctctgcctctgcggcctgctgctcggcaagacgctgctgctcggcggcctgctgagcggcgatagccttggcaccgtaatcctggctcataggctggagaacgggctgctcctccttgggctcgatgatagtgaccgagtcggggagagtcttctggggaccggccttgccctcggggtcggagccgcgcatgatcttaaccttgataccgaggacaccctggcggagaagaacgtgacgagtggcggagtcgatgaactccttggcgggctgaccggagtggatcatgaaaccgtcctgttacttgttagccataatattcttcaaaagctcgttttgcgattgattcgtccggcgcaattcctctggtatagacgtacagtgaacttcatggactttgcgcgggcggcacggagctttccggacacaacaacctcgcaacccttggcaccggactccataatgaaacggaggacaccgtagcaggcacgacgaacggcaagaccgttaaggagcttgtagcggagggactcgcactgagcgacagcggagagaccgcggttctggaccttggcggcgtagagggagacggagttctcggggaacttgaagcgcttctggatgagggaggtgagctcgcggatgcggcgaccctgctcaccgagaacctcctgggtgtgggtggcacggacaactggaaagcccgttagcatcagatccccaatcgaattccgcagatcccaacgcgatcgtaaatcgtcctcttcctcctctttccaggcaatttcaccagcgattttcaagcgatcacacgagggattggtttttcggatttgacgtactgatgtcggtgacagtgggagtcacacggacttccacaccggagtagccctcctcggccagctcgcgctggaagaactcgttcagctcggcatagaagacaccgtcggcgacgaactttctgcgcttagaaatagctccctgaacagcggccattttgacgttcctggtggtggtggaatcgggggttgtcgacggaggggatcgtggtcgagagacttcaattctgagagtgcattatttagtggggatttttcgggactagggctgcttgcccgtttgggccagggctcaaccctcgcttgccggcgcttttcctgtttggtcctagtgttgttaccttatccctgaggcaatattcgtaaggcaataaggcattacctagtctacggattacgagttaacattacatcgaactatacggagtactccgtcattggacgaatcattcatggttgtttaaacgcagatgcataacatacagttgtaaattcttgcaaatcatatctgattcctttgattatcccgttcattgcatctctacttctaactcggtcggtttatcggtgcgctccgctggaaatgcaagcttagatacacccgacgtcacagcagctgccatccccgagacatcagtcgttttgacagcactatctggccttgcagtctcaataccagtcaacaccgtattttccgggatatcactgggtgccgatgaggaacgggggccgttcatctccgcatctgttcgaccgaatacctcattccaccaccgtgtttcattgacccggggaaatataagtcgttccttgccgcgctgattgtcatcaatgacagggtcatacagatggttcgtgaattgttccctgcgagcgaggaaataatcccaaacgctacgggttcgttcactggctttccaatccacgcgttccttctcgttgttgaacaaaaatgtgccatattgacaggagtagagatgataaagaagtcgtcgcaggaaacgctcattaaactcaaaccgtgtcggatattgatgaagcagctgatatgttgcgtctaagaactgatggaacacagggctcgtctcttttggcttagttatctccttctcgggaacccccgagcgcggtatagtaggcttcttcgcaggagtgtcagagtcataggtttgaagctctccatccaagtccggcaaagagtcacggctattgttgtcccgaccaaagaatcctttggcactaaggaatgcattttcaatggccttgcctgcacccccgccgtcaccaaatgcacgatttggatctccaccgatgcgttcattttcaatctggaaccatttctcgctgttcaaatgaccagaccggtgtcggaacatgtgtccaaatgaaagccagtctttctctaccagcaccatgaatccctccagcgtccggaagtaaggatccaaacaaatctggctcagcgcactgagctgactcgtgcgatcccagccatcagagcagtggatcaaaacatgagaatgagtgagaccaacttgccgagtaatcagcctggctccgtccaagatcccgccaatgtgcttcaaccagccgctgcgcgctagctggtcacgatttggccctaatggagtaacatctgagtccttcaaagcatcgatcactttgttcagcgagtctcgcatgacgtggatattgtcaataccaagatatgccttggtagcgaatttgtagttgtccatgttctctgatccaagtccaacagcctgcatggcaaatgcattcaccgtagggcgtgcgtccactatcagattagactgctgagcgccatatatcgagcgatgatcttcagaatcgccacttgtagcagctaacaggtcgtcctcgagttcctcggcattggtgaattcggggactatcacctggttcatctccgggctgctagaatccgtatctttctccgtgaccgagaaactcgccaatggccgctcagagcgagaagtcaagaaaatagcggacagaagcttttcgtcttgaatgcttcggttctggcggacaccgacgagcggctgtgagcttctggtaatggtgcaattattgacagggtgaaagtatgtgagggcagggattcttgctcgagatcgatagcgtcctgcgtaattaagtgtattgtcggagatggaacaaggtacgggtatgagagcgggatacgtaggggagaacttaaatgtgttagtagagcacatttggactaatttgtgcgagcatacctcgtagttcatgttgatctctgaaagacgccatgctttcccttcgtccaagcagccctggcgtgcccattccttgcgcgggtcatacagctcccacccattaaactccttttctggcgggggaggctgatagctaaaggcgtaaagcttatcaatacgactcgatttgcacgtccactgtttgatgctctcgaatacatctcgtgctttgtgctcatttacaaagtaaaaacaaacgaatgtgaagtctcggcatcggaggcggatagaggagagctgacgggaagcggcgggagctggccgcagggtgcagaaagcgatgatagggtatgtgatccacagctctctgggccttgttatgacgccctttatctggtcttctggtgagattggtggggtgtgcgaaaatatgaggtggtgaggggttagatggagggtgccatcgacctgctctccgcggcgagccaaggtcacattgtcaacctggagtgacatggtcagtgattggtctgtggtggcactcaagatatgtttttcgaaccttagcaatccgtgttttctccatgccgtataaatcactggcgcatggtcttcatgatgaatatgctgggtgaggggaacagtaggacaggagaagcggagaatcggagggcagcagtgatcacgagtgagatggaccaatataggtatatataatttaatgtgggtctgtaatcaattggggcgactactcagtctcaagcacctgcctgggccgccttggagttatcgtgaggcgcgcagagtacatgtagttgggatgagtggtgttacacgtcacgggccttgatcggctgtggggcctcaccaaggtcacgcctacaacctatattatgttctatgcatttttgcgatacccggtcagaatagattaatttcaaatgagaaatctcggcctatatagattaaaagccaaagcataatccgtgtctagagcatatatattttacataatgtacagtaaatacaaacccaagacgccgccatgatggccgttgatgcacgctgtacaaattcaaaatagaagtgacccatgctattaatccacgtatcttttgccgtggattttgaatgccatgtcacatgccgcgttgtagaacgagtggaactcatgatcaagctgctcggagtggttattccctgcggccaagtcaatttgaggaatctgcatacccagagagacctcgtttgtccgagcagcaaggaacgaaccgctttcgtagtaccggtagtcaagcggccgtccatcaaagttgtacttttggataacggcgcctcgaatgtcgctgagtggagggaacatgtattccacagcgatgctgctctctgccattgattcgtctgacttcttggatttggttttttgcgaggcaggctggtgaacaagatcacagggaaggatgatgttgcaaaatataggaatgtgaacaggaccttgcgaagccccactgttgacaattgagccctggagtgaggttttaatgctttgcagcattacttggatcgggagcgaaaaggaagtctcggggaagaggtgctcagaggagctttgcgggttttctgagttgggagatgacttatacaagaggtcttgggagatagttcgtgtgaaacgcaggtccagaccattttccggaagcaagtagtcaacgctgtttgtggcgaggatagcctttacgctgtggacgtccacgccattcaagtttgaattcacggctatctcaatttcgagttccggtggggatgctgtgtttgaggttggagacaatcgaagtcgatatagctgtgcctcgttcttcgggcgaataggcgtgagtgagttgatgaaacgcgacaccagaggtacgtcgtttgtgaaagcccgtggaagggagagtctccctagctgtgccggactgatggctgtatcatcgaaagagggcttttgcataaaaaggcatttcccaaccacggctgtcacggattcatgcaaaccggcgacaaaaccgttcttcggaggagtaacccggagaagcttcaatagttcatctgagagtcgtgtttgatgcttgtcgaagaaaggggtttcgagggattccgcctccgcgttttgactggaagacattgcccagcggaaccaagacttttgctgctcgaaccacgaagcatgactttctggtttgtagctataggcactggcaagttctgaagcaggtaaatatgttgaaaatggcgtcgatggagatgtagtgttggataaggccaagttcaaggtcctccgcgcattatccgctcccaacttattctcgttaagatagagaatcttttgtggtggtctgtgtgctcggtgttccacaaatacaccgtgtgtgctgttgacccattccaaaaagtctggtgtaaaaacttgacttattccatctccatgaatatatgggttgattccaacatcatcctcgcggattctgccagtggcatcaatgataatctcgtgcacagactcacaatcatctcgcttgccagtaagtgatacaaggcccgcagattgtgtgacatcaataccacagccatggagactagctagctcatggaaagagaaatgctcagcatggagaagcaaggatatgaattgagctggtatgcggaattccagctggccacgctcgccatcagccaccagctgccaacaattccgaacgatcgtctctgcagcccgggattttcccctgaagcccttggtctttcccaataacgatttggagttacttgacccccatgtccaacctttctcttctatcacagaattgcggttgtactctgaaataaactccgacaattgcttgtatgtgaaagaggaagctaattttgaccacaatgccttgagatcggcagcaggcaagatctgtcctacttgatatgatccacgaatctcatcaattctttcatggactgacttatcgctgggcgatgagttttcctcgttaagttcatccaacatggtgctgattgtgccggcatattcattcccgggctttttgttgcgattgcgattcaacattcggcggcgacgggaaggcacaacaactatttgccctggctttccaagcgtatccacatccaatgtaaacgtgcctgtttcacgttttccattatctttctgttcgcggtttcgttcggatttggggccatcgaaagcgtcgcgttcatcatcgcgactccagttactctggtatcggggaagaacagcgtgtgggtatgacaataatggtctccgatatgaaagcgactggaagctcagaagccccagcttgttccctgtggggcgtcgaagcatgacagaacaataggtctattgcaaacctggtgaaggcaaatatctgtgatcacttttctccggcgataatcggggcgctaggccgcgataagaaaataattcctgcctcaggcagaattccctatctactatgtgtacgattttcaacaagaactttgattatgtaggacaacgctctctcagatatctctcctaattccgtgcgaaatggtttatctaaagtagatgattcaaaccatatgctaataagtaacgcagaaaggtatgtagaattcattcctttggtacaacttcccagctgcgcaagtcctctcttacatcgaactcggaaagctcattatttgtatctggcaccttccatgcccgacccatgaccccctcatacaactgctgctcgatgcttccacccttcttctgatgcccaagcgcagcgagagactctggggtcttactgctcctatgtgagcgattgctggaagaactcttagggcgccgctcgaaacttggagacaattttttgccagaccggctttgtcgtggagccgtctctgttgtcaataggatatcacggcgatcgcccgctgagatgccagcgtgggaattgtgtgcatcgttgttccagcaggaacttccagcaaacaactcttcaaccaactgatcagcaggcaaatcaccagctctggaagaccacgacgctgctaaggtgcgccgatacatgtcttgcatatctgcagtctcccggctcttgctgtcaatagacggcagctggccaaattcatcggcgttgacgggctgatcggtggattgaacaactccggcgattcctccaaagacagtggcagatttcagatgtggtcttttgtaatcagcattgagagtgtgggtcagaaataagtttagggcttcacttacgtcgtgaagttgcggtctccttctagctgacgcatcgcgatcccaatcttgacagtactgttcactttactttcatgcatcaggtatcgccgaatgatcccttcgtcttcctcggttttttccacgtattcagcaagattgagtttgattttgcccagcacgctcttttcggacatgggcgacgaggtgaactcttgtatgacttcaaaattgagttcacactcctgaagaattgatgtcctgtcaattgtaagccttacttgaaggcatttctcataaccccagtaagcgcggtgatctaatagagttgctttctctgtgtagccttggtgttcagtggagcttgacgatggcaatcgccatcgcacaaaagcaacgctgtttcccaaggggacgttattgatatcgatgatctttttgaggtcagaaatcttaataacatttcgacggtctgtgtataatgcatacccttaatatgagctcgaacctaggctgtagcagagtcagttacagatgtaattcagtcggctttattggttaacttactcgtctattcttggggactatggtgagtgtgttagcttacatcaattaacaggtatagaggaacataccaaatgcctgcatgttaacggtcacgtcaccggctcaagcttgtgggaactcagatgccacaagcacatcaactggtccactcaggaccgacctcgaggaaatatctcggtctgaggctgagaagaaactcaactagcatgaatatcaaatgccaagcagtgatagcgtcgtcaaattggctaagagtcctccccgcatacaccgtggacattatgggcggtgaagtgtcataacatggcagaatcaataaccagactcgccagtatccatctcacctcttctcccaaagtctcaggcgatcaatacctgttgcttgcgaaatagtaccatttctttcaaccttatatcgctccacgaccatggtgaaacccgagcctactcctcccgcttcatctctccctgccgaagccgcaacagtccctttggattcaacaacccgcgttaccccaatccaccccgatctcaccgaaataaaagttccacaaggggcactgccatcatattgctatgacccagtaacatgccaaccaatcaaacatcgggattaccaaactgagcttatgcaactggaagaacaatacaaaacacgtgaggcagcgctccatgcgcaggaagaaattgccaaagaggtgaaagagaagattgagactgcggaacggaaacgagaggaggttcaaaaatctattgacaaaaaggtcaaggaacgcgacaccgagatgaaggtcgtgtccaagtttcaagagaccaaggcatcggacattccgtcttgagggaggtgacagcagcgctttttctaaaccattcagacgacaaaggagtaaccaaggttttcttcacgctattgtcaccttttctggcggacagcctacgcttcacaaaagaaatttaattcgctttcagctcgaaagaactcttcatctataattcctgtgaaggcaactaccccgacactcactatggatcatatcattgtcaacaattctttagaaagaacatctctgtttggtttaaatgtggggaggcaggcaagctaaggaacatttgcgcctatgtctatccgtgtgagagttcgcttgaacactatgccaatgggctctccaatctaattccaacatcttgaagcgaacgtcactcgactctttggggaatttcagcacaatgataaacgcctctcgcgcacaataccaactcatggaaatcgaagagctattatcacatgtcaaataattctcccatctaaatagcaacccatccagatcaaatcgtcggaaattcaaacagcatcaataaaacaccccgacatgctttgagatgttctgtttagacgtatagaaggctgtgaaagcatagaccatgcagaggactttcctatgtacaactagagatgtcagtgggaatggggtgattggacccgatgccggcggagaactacgctttttcgttccgttttcacggtttcgagcgggctgtctatgacctcccaagccgccggcgaggttggggttcatatgtcgtcaatcgatccgtccactgtctgaagctagttgcttggacttacggagccacgaatagcgatgctggattttacgacttgcagatttagcatctcgcttggtttgcgtggtttgcactatgattgctttcttgcttgatggtattaatctcgtttgacttaatgtcctgagcagatatcgcacttgaccgctggtttcgtctaacgagacgatgcattaaatcaagccaggaaggacagtgtcgggccctatgataagcgtatctcagtgagaaaatgaaccacacccttcgatcaatagtgtttcaagttcactatcctcactatgtttcgttcaaccttgctgagggtttccggtctacgtgattcgttccttaacaatggcatatttgaccttggtatatgctcccccatgaggcgggtgagtatatagagctgcggagagaacaacaatgtatctctataactatctattgttcctcgtgtagttcctaccctcctcttaactttatcccggagagccccattgtgtgataatcttctcttcatatgttttcctcattcgctatgcttttctaatttttggaattacatcctcatacggtactcggccactctatgctcccctatgctaaaaagaaaagctccaacagtcattcgatgctagatacacggttcccgcattgctacatagtttacgtcatcgtaggaatatgtgtcaactcgcctactccgtagtagaatataacctaacaatgattgagaacaaggtgtaaggctatggccctcaacacactatacagacgtttgtgtgaaaagccgccaagagatatgccatctcatggccacagctagagggagttattaaggccgaagagatataacaggtaggagtaacgagtttcttattgagagagaccaccacatcctgtcgaataataacccctaatgacaactcagcagtattcttacgtatcgttattccaacggcttatcagaaaaccgagtccttgagttgtactatgaggaagcgacaagccataccttactggtgagacatgaacgatgaggctcaatatatgtattcgttaatgtaatgtattttgtcgaagaactgctcttcggagctatagggaccaactgaaaaagctaaatgtatagaaaggtacaatttatgctcaccgagtcaatattatgtataaaagagtagtcataacaccacaatgtttaatgctacgaaagatgtttttacgctttctcagtagcgatgtcgttaccatactctccgacctgacttattggtaaggtgctttgtttccaaggctgccaattagcataaaaaatgttcggagattttcaacacagccaaacgcattactcggaggtttgagtactacccaacaataggggatgtctaggaagaagaaaggaaattctatcagggctgttgcaaaatgaacaatgatttgtgagtcacgggtttcatgatcaagtgtaccactcattcatgaataagccccttgggtatattccaaaagcataagtcatagtaaagcagttgcttagcatagctaaaagcaatgatttattccggattcacctaggagtttgtccaacgaacggtatcgcgtccaatagtagagcattgtctagcttcgtttcaaatcgaacatcatcagacacatatgagtcataacagatgcggtctgcaaaatataatggatctcagatataactccgtttatagtgcagtgatgtcaatattccaacttgatggcagccttgacaattacgaaactaggcttgatagagctgggtttcagtacccgcctggctgtggatgtggttaagatctacctgagattccagctctcaactcttgccaactcatacctcttctccagtgggttttcagcaagacaagtgaagtggacagagggaggcaagaaaatatacggagtagtaagttactactgtactactccgtagtaactagggctttgcattgtatgtccatgtggggccggagatatccgccacaacgtggcgagtaaattgcaccgcctcatatctattttaggaaaagcgacctcggtcgcatatcgttaggccatgctactctatagatacacaataacaatgacgaaagctcatccgactcaaagcgaaccctcatacacccacacaagaccatgtgaccgaactcatatgcagcagggattccattttagggaagaggcagaggcgcctgcggagtacagagtaagatgagatcattgaagacatgaatcatgtggagaaaacaataggaaacggtatttcagtacgtgaaggctagtggcgccgacccaaagtctggcaatggaggctcagcccaatggcagatcgtagcagggatctcagcttcctgtgcattggccggactcggttggtctcagcgaatcccagccctgaagtgactcaagacgggctctgccccacgcttggtcgaccctccatcagctgaggtctacgactctgtatcgtcctagcggcactcgataggtccaaaaaaaccttgatatggttgatatggttgttatggatgtgtttcgtgtaatttgttaatacagtaaaccttggagtattattttctcttctccaaggctaatatccagttggatattgaagcacaaacgatgttgaaacagaaaatgggatcgaaactaaggcttggcctgcagccaaatttaaattagagtcttcacccaagcgtggaatctttagtgttgaggatcctgtatcttttttaacgatgtgtagatcttggcgcacactgaaatatgcacatcgcccagctgagaaatgtatattttaagtccccgctagttgtagatagtaatttgatcgctctagatgatctatggagactcaaatcttcctgtttctttccgttcacggccgtttccatggatcattggggcttagctgttgcagtttagggcaccatgcagctattctgaccaaatggacgtgcaacgggtgagactggcactgtgcgagtcaacctgtcaaatttgatgaaacgtttagatgtcgcgcatttcgaaccgtttcaagtggtattatcgccactgagtcttcaggttgcagatcggggagtccgagatgtgtatgtacgtactccgtacactgacattgactccatcaagctgcataccagaataataccgtagaaaacttggtttatatgttttttttttcctaatatgtcctaagagccaaaaaaatagaaaaattaacatattattgtggccattaaatctccgcttatggtccccctcttaattattattcttcttaacttccctcttttcttctataacctcactcttgactgactttcatgtcatctcctttcttttatattataatttctgttctttttgcgcattcgcccgcactttaatactggattactcgacatatcaacccaatctcaaaaaaaatccaaaacttcttgtgtgggcgaatgtcgcctttatgattcatgttctatattctacattcatttatatcaactataccaacgccggacgtatcacctttcgcacagtgtcataatgcaaacaatcttactcccatcttctgccgctgcttttgcgccgcgatcatccccgaatgtcgtgttgaataccaaggttgagccttggttgacggccaccctgaagcgagttaaccgggtcaagcgtcctttgaacaatgtcacccagcatacccggtgtttgacggaaacactttcgtcaaaaaatgcaatctggactctatgttccatgatgttcaccaaggccccccaggcagagctagagaagaacgagaaccagctttgggaatccctgcacagccaccaaatgattcacatggaggcctatgttgtacatgtcgacatggtctcccgcaacgaggtggttttcaagttgactccggaaaccatcgaatccctggttgattttcacaaggatgtctactcggtggatgccgccgccaacacatacgactggccaggaaagcacggtgagctgaagaggttacaggaggagtttgtccaagcagccaacaagtttgtctaccgtgccaatgcccaggcacttgaggggctagaagaagacggcgccggagagctactaagcggtcgcagcgacgaagcaaaggcagccatcggcaagctctttgtcccactggttgccccttcacctccagtggtggatgttatgcgcccaattcctctcctgcctagttcgacaggcccggaaaactggtggcaaaacccggtgccccaacaagcaccactcgagtcgtggaaagtactgtcgcccagccccaacccggccaccacgggtgattctaatccgaatctttgggctagtctcagtttcagtgatgcccaacttgcctcaccgaccccgtcttacagccaacccttcactccttcgccgttccagacctacaactgcctaccaaccacctgtatgccaactacctgcatgccgaccacgtcagccgccatcagtccgctcccgttgccgaccatgttcccaagcatattcccgagcatgcttgtacaaccttgcagcacagctttcaacatggggggctttagctgggccgactttgctccgctaccgtatggcacgatcgtctagctcagccctcctgagtagactcagtgatgtcgaccatctcaagtccaggctccctcggttcatacaacgtgggttcgagaaacgtggatcgtttcttagaactagatgtgcgcgcaattctttcggtttcttcttgactccccaactcctctctctcgtctctccctaccgggaacccgattccaagcaacgacaattcgcatccttgacggcgttctctttgatttgacactgtgcatctgtgatactccctcctgccttttgcatgataaccagaattatctttttctgcgcttgttttgatagttttgatgtttgattctagcgccagcgtgtctttttttactctttctctttttcatttttctttgcattaagaagcggcgggtcggctctctgttatgtttcgtttcttttgttgttcccgcatatatgtcatgaagactggtctgcctcacggcatgtggaggatatgaatttggacgtggaatgtccaacgttatgttttcgattcttctaccgcaactcctggaaatggaagaaagcaagtatgggttacccgactggactgggttcagcgtctgcctttggtttcctcctttcttacgaggtctgtccttctggtactggttactggactggctagttctctttatctgagaattagaggatatgtttatgcgatggcgtcaccttcatccatgtatctgtgatacttgattggagcacgcatttttgtcatctttggttcaaggaggtgcagatcagcaacacgagtgtgggagaagattgccttcaacccttgtcagactcgagtacatccgcctgtggcagattccgagcgcaaagggcgatgcactggatttcctcctttggtctgtgacctggggatcttcacattccgccccaagcggcaagtggtatgagtggcagtcatctccgtcctctgtgctacgaactcacctctaatggccatagttggctgatagattcatcttctatcgtccaggctggtttttagatattcctggacaagcttggtctgtcggtgggctctttcactggatgtaagagcccttcattctttatcccgacgacaagaatcagatgctcgatctgatagatactctcctttatgatctgtttggtcgaggggctggtccctcgcgctggttgctccttttctcctggtcttttttgttgatccatcagcagctctgtccaaatcttccatgtatctctttagcttagttttgaaaagagcttgcacaatttcttcctctcaatttgtacctattcgtcggaagtaaagtatcaaacacagtgtccggcatttccttatagaataagactcatcataacaaaaatctgaatataaatacatgtctcaagatccagatgatgttggttgtgtacacagttatttaccccaggtgtatgacgtcaacgtcaaccgccaagacagcccggcctacatcatatccaagttgatcgagactcggcgtgtttcgttcacaggtcacttcttttctatacttgcatctatatctggcttcttttatctgatattggctttttgcatgtaatttcgttgcatttgtctcttatctgggatttaccagctcatgcttcagcaattgataacctagagcctttctgcacagaaccatttccgcctaagcaagccacctgaggattgttagacattgcaatcttcattagattcggatatcttggtgcccaagtgtccgccacccgcttatcccacctccgtggcctaatcccggcataaccacgagctgacaaaccccgctccttgaaacaagtggacatcccgaggtcacttgcactaccggcacaacttggataacatcacagaaggagaggacttcaaatattagggcactcctactgcacatatggctaccttacacgatgccctccaatgcctcaaaccgacgtcatgggacgaagtcccccaggatcccgacgagctccgtgactacttgcgcgcgatcttcaaaaacagccgcctgatagcggagtcacttccagaccctccaatctccgataatcacgactacccaggattagacgacacaccgaattcctccgaccgacgaatagtcccatcacccgcacgagtggaagagaccgattcggaaattacagacctgcaaaaggaatgggggaagccgctcaagatgggcggaccgaaggacaacccgttagacgtgactgtgtggaaactttccgcaaatgacggcgggggctcatggttcgggcgacggagtgtgcatgagggcatgccattctcacgatggcggaagaagctttcatctgagtacgatgaaacgctcaaagtaaaccgcagaaagattgagagggggcacacgcctgacaagagcattcgcgggatcggcgccgaaggaaagatggatactattgaggtcaaggatcatgatggttcggttctgggccatttagttgtttaccatgtatcggcgcagtttcccaaacctacttctccccgcgattttgtggaattgatcatcaattccgattctggattgcaaattggcggaactaagcagccaggtcgcagctggatgatgatctctaagccgtgtgaacaccccggtatcccgcataaacagggatacactcgcggacagtatgagtctgtcgagctcattcgggagattcctaagaagcacagcagtgggagcagctcttctagccaggggagtaagaagaatagtgattctgcgtcctccaattcgcaacgccctgtggggctacctgggcaggatggagctggggatgaggaacatgaagaaatgaatcctgttgaatggatcatggtcagcaggagtgatccgggcgggaacatcccgcggtggatggtggacaagggaacaccacgaagcgtggggacagacgccgctaaattcgtcaattgggctcttcaagatgacaagccgcccaagcgaggagaaatcacaggaacggaagctgcagatactttatcaggcgtcaaggctaaacccggggagtctgtgaatgaatacgactccgaccaggaagatgactcggattcggattacgaatcactcgacagcgactccgaccagtcccatcatggtctgattgctagtgtcactggcttgctcaatactggactggaacggttcgcgccacaagttctaggctatggcgcccccactagggtatcgggtgatctaccagccgagaatgaggtttcctacattgatgcagatggaatgagacatctacgtccagaaattgcccaacaaaataaatcagcgttggacgccgaatcttcaagatcccaagagcaagacgatgtttcattatcctcggccaattccgaaaaagcagcaactgccgtcgaggacgtaacgaataacatgtccccggaggaactgatccaaatgacaaagaatggcaagctcagttccaacgagaaggagctcgcaaagctagccattcgcaaacgcaaggttgaaagcaagctagaggaagtccgcgccgaaatcgacaaattccaaatctcatcgcaaccgcctagtgtctcagggaccccagtaaaaggcatcagcgaggcagatggtgacactaccggaatgcgcaagcgcgcagcgacgaataggtcttccaggcctgccagcactcgcacacagcagagccaaggccaaccgcagagcgagatcagcaatgaagaccaaccatctcctgggcggatggcaacccccgacccgtcgcatctccccaaagcagccacccactatgtccacggagaatctaagctgcttaagcagctgcgcaagatcgaggctaaccaactgaaggttgcgtcgaagattcaagcaaggcagcaaaaggatgaggagcgctcggagaagtctaagtccaaaaacaagtccgaggttgataccttgaagcaggaggtacataatctcaagaaagaggtcaagcagcttcgctctgagcgccagaaatgggtcgatcttgtttcttcgttgcaggcggagaatacgaagttggcggcaaagtcggaggttgcttaattggtggatgaccataattctatggcttgtacatactacattgttttcttttttcttgttttgattttgacgggagggtctgacatgtcctatgattttataacgacatactttgtcctatgtcttttactgcatatttctacggaatgaaagttggaattggatatcttcatgtctcaatacattatcgtcatgatgatttgattatgatattgcagaccatgatagatcaagtgaagatacggctctggggctgttttccctatgcattgggtgcagttgagtaatctgatgctcttcaagcaattccaggccatctacaggccatggtgctagttgggtagttcagaacttgctgataacttcatgtggtaggcagggtatatcacaagttgtccgctcactgacaagaattgaaagattctcgaggttccagaatacgggcaaacactcggggataccaactgccagaaatagggatacgacggccttgttcgtttagagcgtttcatatgttgagttggaattgttattcctaccgaaggaatcgaggggtggtcggaatatcgggggatctgtatggaaatccgaggacgcgacaaggggtatcaaggaaaacaagaataagccacacttagtaggtttactcttgagtctaatcattggagagcacttgttagccaacccatccttgtatatgctgagcaactccgcaagatgccacatacctctggcggattaccagcgcctctaaccattttctccagcatcattgcgcgcaccttctcttttggttcgcccatgccgactgccatgtaggatagcagaggagggtgaccaacgtaggaggagtagctgtcacggaggatgttggatgtccattcgtacttggtggtgtcggcgtgtccggtaccgatgtaacgggcctggagagcctcaaggttctggatggtacggagcttgtcggccatggtggagaatagagatgttgacgttggactgagaaggatcgcgggaaacttgaaaggacgacaaaagatagaagggaactaattatgcctcaggcatatattatatgggtaacacgtgactgtgtgggcatcttgggattcttcaatcctgtctttgccttcaacaaagcctttggttgtttagaaaattgctactcggactgtgaccatatccaatgtctgtggacacatctagttcatcattaccgtcccggatagcatcgctggttcatgcacatttcgatgctctgccaacacgcagtaagccaaccatatttccggatggatcgagagaatggattccaatgactggtattgtagctgtcaaaggtatgctccattacttaacatgaccaggttatcatccctcatccatgcatgtaatgtgaaggggatgggtccatcatttgctttttacttcatcctcacaacacttgatgttctatagtaacgtttttgtctcttcccttataggagaaaacacacattctgaaagtctgacctgcatatctgtcacgtaagttttgaattccccacttgcaagtctgacccatattcactgatattcatgtaggagtggcgcaaaatgcttgtcagcatctcacatcccacgctgtaggggtcttgtactacatgactgtcacgccgagatattggccatccgagcattcaattattggctcttgacagaatgcaacagtgtcctatttcgggagaagcaattaccgaatggccatgatacttgtaccctcgataatgagaaaatctcagattccccatttatacaaaggagagagattgaagaggatgaagataatactagtacaccgcccacagaatggccgccttttaagcttcggcctgatatcaagatttacatgtattgcacatgtgctccctgcggcgatgcgagcatggagctctgcatggcagctcaagaagacgctacaccgtgggagatttcacagcaagaagcctctttgtcagaaatccaagacgcagagctcccagatacagagacccttctagatggccgggcccatttctctcttctcggggtcgtacgtcgaaagccagcacgaatggacgccgagtccacacgcagcaagtcctgctcagacaagcttgcattacggcaggtttcctccttgctgtcctgtgagaccagtcgcctcattgctcctacagaaaacgcctatctagcaggtctgattcttcctgaggacgaaataagccaagttggctgtgcccgttcctttggcgagaatggccgaatgcagcctttgggtgggcgatattggcctagaggggcaaatttcaaagaaagcacaccaggatatcgattccggccattccaggttctttcggtgccgagtgaagaggtgacagcactttggcgtttcgctaagcccaaatccgggcctcttcctgcagcttctgtggagcagcaaggagacccttcgagccccggtacaaatgttaggaagaccaggccagggaatgtgagcgccatttgggtattggctccctcgtatcatcacccattggtaatgaccatggataccggcagcaagtcagtgccaactctttgccgttccaagactggtttgtatgagactatcatcaacggtgtgaagcaaggaaaccgggcatcctcacctggtgcccgtggagcctcttctctatcccgagccaagctttggtctctatttcgcgaaattgggcctacatccgttccacgcacctatacaactgatgtctccccagccggaccgttattggggactgaagattctcatatcaaggcagttcaacaacacatgccagatataaccacctaccaggatttcaaaaatcctaccagattaggagacccgttgcaaatccgtatgcaggccatcagggatgcgaaagtggttctcaagggatggattcctaatgcaggagatgaatcttggggcttggatgttttggttgaccccaaaaagcgaaagcgttgattgtgtccagggatgaaagagtgctaaagattactctaggccatacatagtaaacctatcgtattcccctctcaagatacccatatatcgtttctaaacaaaaaaaagccatatgtttaaaaaacttcttgctatcagagagaaaataagaggactggtttgtaccgttcttgattggcagccaaaggcgtcaaacaaaaaaccgcgatctaatcaatcagggtgtcaatgagtccaagagaatgtcaacaatgggatgtctcagggtttttctcacacctttgattgtttgttcttgttcttctcaccactatctttcttctcccatgctttctgatcccagtctcaccaacccacgacttcacaccttagatgtcaactcccatgagcaacattcgatagaggaatccgcttcttcaagagagcactgatttcatactccagctttgtcttcaagatgactccgaaggctctagccgagtgtgcaaaatgtgagacaaaagctaagacaatgtgtttgggctgctcgcatgcacccgaataccaaagcggcgattctcgagttgttttttactgcagccacaagtgtcagataatggactggccaaaacacaaagcctattgcaagaatatgcagcgacggagattactcttccgagctgccctgatattgaaggcagccatgttggcatacagagagactgtatacgacgtggatctaaccaagattgagtatcgagatggagtcctgtatctccatcaaaatcaaagaccggtttcatctctatctaaacgtggtcccttcccaaaccacatcactgacaacatcgaccacaaggaagcggctctcctgaaaagccaatccacagcagccatgtcactcttaggtcccttgaccagaaaactccttggaggtaagaattatttctaactcctaagtacccaagtgagacatggctgaaacaaagcaggggtacccttgaaaatcgagaccatggtcgtcaatatcgggaggccacgggttccaactaggcttgttcctggtcctgacttgtacggcggtccgcacgcggttttgaagatagaacggatggagaggaacgaaacatggattatcgatacaacaggttgtcaatatggattccgagatgtgcttgttccattcgccaagtactttattgacaacgaatgccggatattggacggccctcgggtttacgacgcatgcgagacaaaggagctagactacttgtcaacccttcatatcttcaacaagacaaaagcacaacggcaagatatgcgactagaacggctgacccgtcaccattttgctgtcttcgtttatatgagtgtgcatgataacttccttgtggactctggcgccagctacaagagaaagattgatcgcttcgtcaatgagctcaaaactcacatggttgattctatgaggaaggcaggtgacaattttgaagattctgaagatgattgaagaacaacggaacggttcatactggtacatttgttcaatgagtttcaaactcgcgtctcactttcgatatcaattatgtaaataatttcccctattccctccatccctccctcctctacttggtagttattgccatgggattgacactgaggaataattttaagttgatcggaacgagcaatctatcttattcgagtaattcccgcccggttacatagaccaattcatgcagatattcctttggtggccaactccgattgctcggttaataggaaattccgatatccctggcatgccgaacacagctcacggatcgagtcagaatatcagagatgactccggggattgggatagctagtatcttgctccttatacccttgagagcaggcttgattcggtgggcctattataaaagtaatcgcagataaaagtattggggatcattaatatacaaaaataaggcatagaagtaaatccaaaaacatgtgaaagtagttcttgataaaatctctcagtagattccagggatgatgcgattgcggacgatcgaggtataacgcttccagtcagcgccatacttcttctcgcatttctcctcatcacgcatctcacggtggatcaacaagataccaaagtagagcatgtagaagtatgtgaaaatcataccccagccacggatttctggggtctgcatggcttgcttctggacagcgccactggctgggttgatgctctcgatgagaacatatcccgcaacaccagttggtaggcagtaggcccacgacatagtccagtcgcccaggtagttgatgtgacgcgccagaccccaccagccggagatcatcagtttagatccagcggcagtttcgatgtacttgatgtttttcacgcgggggtcattgggattcgtgcggaaacggttcttctgattgttggcgccgcggaagatcgaatatccaacggctgtgacacctagaacaacagccataccggtcaagccaagctcgtaggggaagacagagagataacggctctggatgctgtacagatggggcacccaaaccacgtcgccaaaagataacatgaatccaaatccgtccatgattacatccatggtggtcatgattgctggctccatgtatagggcatcaagaatgtagaatccctggaaaagagtgaccagcacaattgagtcagtgatatagccataggttcggtattggtgggctacattggacaggttcagaattgtccatccaagcaagcccggtctcatctccatgaacaccttaatatcgacagtacgcgatgcctcactgacaaacggaatgggcaggcgaacacgagggttgagttcacgtccaatgaagaagtcgtagagcatgttgcccgtatggccaccaggtgccagctctcgtagatttgggtttgcctgccctggggctggaactgtgaagctcctcacgtagacgaacagtgcagcaaaagaagagatcaacaagtttgctgtaatgacctggacatagttgtcccatagaaatgtccacaccacaaagtcggctccatagagataagtgcccccggtgaggcccgagaggataatgatggcagaggagaacgctacaaatgagccgagtcagaaaaaaaaacttcaatgttttgaatgcgatgtgtgagggaggactgctgccaatgccataccattgaatttatacttcagttgtcctctgcaggccaacacaacaccatctgcctcctgaccgggaaggaagacctgcaagaacagactgaagacatagtagctcagtgtccacagtgtaacattggtatcataaagcgccgtgattccctcctccggccaacccacttcacgcttcaattgttcgagtgacaaagtcgagggattcagtagcgatggtgcgggacaaccagagacatcgttgcagacgaaggtaaagaggtagatcaggatgggcaatccaaatataataccaaaagcacctagtctattgcaaatgtcagctcagcttaacgcgattgaaagggaaaagacatacggtccaccaaactcataaccacgtttctccggcactggctgcacgggtgtttttatggagtcctttttggtaggcatattgaagtgatgactgggccaatggatagacagagaaataatccaagagctggggaagatccttaaataagacccgggagccttaaggcgcgtacgacatcggatggttggtgttccgccaggtttgctccgcatcgcccccacagcggtgatgctacgtaagcctctatctctatcagcccggcgttacctgcacgcatacaacctacctccttcgcaccgatccattaaggtcatttctatcattttgcaggttatatatctttctctagtctctccacattctttactttattccatttcatctcgttctattctcagactgccttaggcttgggtgaccagtccaccatgaggctcactagctccgctcattactccattttccttctatcctcaattctcggattatctagcgcatcatactcttcccattttgaagatgacgctccctgtgttgcccgctcgccgaccactggattgtacttcgacctcaatgcgatctcattatccccgcccaaaatgaaggacggaaacaaactcgcgaaggatgcgcggaccgagagctggtatgccaggggtcatgattacccggctaatttcacaatcaacatatgcgcgccggtcattgagaacgtgacggatgtggtcgggatagagtcatcgcggtggaagaacgtcagtgcatattacgagcgggatgataaaagatactccatagggtatggcagatctctatctaaaccggttacactggttgtattccctgcttactgtgctaacgattctcggtcatatacaggcaacaagcatctgaacctttcttccgtggccgcaaactcgttctcaattataccaatggctcgccttgtccggacaattataacacgggcagttccaatgcctccacacgcaataagtcgactatcatgtctttcctatgtgaccgcgacgctgcgccaaacgtggccacggcttccttcgttggctccatggatgagtgctcatacttcttcgaagtccgtagctcggcggcatgtggtggaatcgccgtagatcccaacgccggcggcttgggaccgggcggcgtattcggtgtgatgtgagcaccccttctgcgtcttgggggaacaccccatataatccatgctgaccctgtcctctagtatggtgatcgccatcgccgtatatctgattggtggctgcgcctaccagcgaacggtcatgcatcaacgtggctggcgccagtgtccaaacttcagcctgtgggctggctttttcgactttgtcaaagtaagtatcctagcattgatcccatgttggcctcgtcgcaaattcagacatggcaagttcgtgtcgcataagtttcgggattcaaatggggcaggactacctgtttcaaggatggattgaagtcgctctggctagtctagggaccaatcccttcgggaaagacggttgcggttggcctgtcccatccatttccttatttcttgtcaggcatagatcattcttttttttacctgcatgttctttcctttgattctgaccgcctgtgttgatcacggcgtctacatttccatatgtttgacaagatgtcttgattcatgcaagtggattgtcccttgggtacttgtcaatgaatctgccacttcatcttcgggatggtaggagacagctcctcttacttggttagacggactatatgttttattgcgtgtacttaaatgattggtttcaattgcgagcctcgttgtttgaaacatgacactgaccacttctttctttctgcaccaacaggacatgttcgtgattctcttttcgtcgctaggtaacctcttccgttgcagggggtccgccgcaggcaatggctacacccgcgcggactcggacggccgtggcggtttcatcggcgccatcggaggacgtggggggcgtgggggacgcggtcaggggcgtgacgtggatgccgagaacaggctcatagatcaactggatgaagagtgggatgattagtcgagggttgcttttactttatcttctctgctttcctatacactttccttgcctttttcgtctggcagctattgccacttttgttcctcagctctttcaaacaatagatttcgaggccttcgcccttgtctttttatctgtgatgcaaataattcccgtgttatcatattttgtaagcgtttacatacctctcgaggtcggtggaatatatattcacattcaagactctgtgtaccatatcaattcacacattgcctacagacttgttcaaatgtgagcagaattgagattaaattctaaatgaacttatccaatcacatctatcaaattcaattacgcatacctactttaactatttgatcttactttcaatgtgaattatagtcgtgagtctaagcaaacatagttactacagtgaagaacaaatcatacaactagcatcattggtctagtggtagaattcgtcgttgccatcgacgaggcccgtgttcgattcacggatgatgcacaacatttacttttttgtatctcatttgcaggattttatttggcagaggaaaaagattctaattgcttttttttttatttctttagatcactggagtcattcggaaagttgtaatgtctaaccaagaagaccgagccattagacttatattattcggaacatctgccccaaaaaagggatataaatgccgtagacaagacaataatatttacacaaatcaacacaaatggggtaatatgaatagcagcgcgaaaagtaacaaaccccagccctaaaagtccgactccaaccctttgaaatcatcgtaaagaaaagtgaaacaccacgtagcagtcgtcgagaaagcattagctgatggatagtatatgatccgatcatggccgtgagactttcatattcgaaccagtcaaaccaaggtcatatgcgcttaaaggcatgccaccagcacccctgaagccatacatatctacagaagggagcccgggcgtgccgccactattaactaccccaggcatgggagctgggggtggagcttgtgatggttggtttccaccgccaacagggtcaagattgaaaggcaggaaccacgcgctgggctggtagaactcgcccattccagcaggggcacttgggtccagatggcccgtgaacagtgtttgatctggacttggtgtttggacgccattgagtggtgggataggagggttgtttgggacaaatgagctggggtcgaattcggaaaatgaaccatagacgaattgccggtctagctgcggtaattggtctggtgggataccgaagtcgaatggcggttgaccgaacgacattggtcgggattgttggagcatggatggctgtgggaatgcgctgcctggaacactcggggtatttccgatggttacttccatcattgatggtgatgaagactgttccatgcctgaagctccatcggatagtttgctgttcttccgagaccgcgatttgcgcggttggcttggctgtggagtaggggaaaggccggcaaagaaatcctccacgctctggaggtcaggtttctggcccataactgcgtcttcgcccgtttctttgtgccgggtatcggggtcctcccaatgcactcttgacactccatggggatacttatcgaaccagtcaccatattggaacatgggcgttagcgatgcaccattctgagttgccacagagcccttgatagctgcatcggcgaactgccgataccgatccttggcactctcaaccatatagtgaaacatgccccaatactttttcattttattgagatagcggtacgtatgccgtaggttctcttttgaccgtgcctctagctgaacgttcttcgagaatatcccccagatgtggactgtacttgccgagtaagcacagtatccagcaaaaggaacagtgagggggtaggctgaagcccgatcaaaaagcactgaaatgtgatgcgccgcttccaccgcggctcgacctgcattactgaggaaggactttggcatatctcttggtggacgcccccccggggacaagggaatggcgaactggttgagaaacagcatgttttggtgtatgataatgtggaggaaaatgaattgatttgcaatcttctccgctgcatggatttgaagatgctcgtaggtgaaggtaaaaggcgccggaagagacgcggagaactcctcaatttgccgcttaagctgcatgtaccctgactctggatgccaaagtggatgtaagtccttactctttccacctagattcaggtagtcgacaatgcgcccccaaatgacgatagcgcggataatgtacgctgaaacacccatgttttctttagcgttagataattggccggcatcgtcaggtacaggattaagaatatcgccatcaagatcttccgtcggaccaggtatctccatctggaagtggggttccttgataggaagctgtatttgtaggaacttctcattcccaataggtggccgttggcttccggaagagttataccgatccatcaagtaacatgcccacatagtccggcgccgaatttcttgatctgtgaagctcaactttgagctgttgccattgttctgactgggtaatggatcctgatcaagctcctgatggagctgcaacgcgtatgccatccgtaatgcttgacctccaaaagaccaacttcgcccaccatgacatgtcccaaactcatgaagaccaagaagtaagaaaaccgtaagaattgtaatgttcggctcgtcatgccggctcagagcgaaggccgctgcaggattagcccagttttctccacgtaagaatggcggatctgagttcagctgaggatgtgtggagaatcgcgcagatacggcacagacagcaagaattaggacagggggaattgtgcctgctttgagccgtcgcataaagctgggtttgtgtaataagaggtatgactgcccatagacacaatcaaaaaatacctccgcaagatgctcttgaatctccagtgagggcagaaactcagctccttcgataagaagcccagtcccatcggtggatttaggttcacgattcattgggaacgtctcgtgtggtgggcggctgtgcccacgagtccattcatccatctctgccgaaaatgcctcatctgcggttcgtttcttctgtgcctttgacggctgagccgaggcggaaggtctgacaaccgatcttccaatagaaagcatatcccttgtctcctccttaggtattgtcttgattacgcgatcttccatcctcttcagtcgcttgtccagcatagccatataatccgtgcgcggcgccgccttccgcgtagtaactttataaacacacggaatcctcgagcgcgtacaatgcttgcaggcaggcttctcgcccgagcagcggattttcttgcggcggcatgcgatgcatgccagtggcaggcgcttccgctccttccccgccttggtcttcatctcgctccaagccggtttatcgtcgtcgtttagatgttcaaaattggacgggccgttgccggagtcgtctcgcccgttgtctgggcctagcgcggggtcgacggtttgtgtgctaccagggtcacgggaacttgcatggctttgggtatcgaaatcctcgagagctgctgccgcctcctcctggcctacatcaaagcggacaccaggggttttcgatggcaattcgtcgggagcgggttggatcatgacgggtgcggataccccaggacccaagcccgaagcatccttcggcacggtcggggaaaaaagaaggcgcttccgaaatggagcgcgaggtcgttccggggaagatcaatttggagtggaatttgaagagcggggaagaaggagaggcgaaatggaggagaaagtgaaatcagccccgaatatggggaaaaggttcagcggcgaatggtggcttggcaaataattacaattcggccactggcggcgctgatattacgagactcgaccacaatctttctatattggagtataaagaatcaatgaagtctgctgtagctcattgaaaacacttgaaacagggaaagtacatacgcaatcgacttgaggttattggattcggaggcgccccaaccctatatccccctttaactcctatattattcccctatagttctacgtctgggaatatatttgcaatctaattccacttgagccacgcatattaaaaatggccccagactcataataccaccttcatggatatactcgcagtatgcctggctctctcaggacggaccgggacagccggattggcatacgggctgacacatcggaagcttgatagaagactaggactagcgtgcagctacatgccaggggatccttattgagtggccaacataataagatagttattcattgatcatctcgagtgcattacagaagcaggaccccttttttttctcttagactagccatcgatcggtaaatgccacctaccgatagataggccaaagtcgtctggtttttttctctcaagagtcgctagcgtcatttcacgtgtcgcatttctgtacgcaggctattctctagtttgcgcgactgatcctaggtggatttcgggcgtccaaccttatggcgtggtgttgcgagctcaagcgagttcagaatctcggccccgagaacatagatattgtagctgggaaacacgagccacagcccactgaatgatattagtgttatatttcatgtaaacatgcactagacggagctcacttagggaggatccagtagaggaacagagtaagcgggtcgttgtgaccgatgttctcgaagccagagaagatctcgttgagccctattttgttttgtgttataatccgacacacaaagcccaggaaatagatatagcttacagtaaaggatggtcttgctcagggtcatgacagacgcggtgtaggcgaccagaagtgcggtcgcaccaatgcgcccagcgacgaccttgtcccccttcagcaaccaggtgaattccttggagatattctgcgatctgccacctctcccaaccgtcgatccatagtggtagacaatccagaggtaatagatgtaaccgatagtctcgaggacgttgagcatagtctgtgcagccgtgaagccattatgcgcattgaaggctggccagccatagatatagtccacttttccgtacagcgcgtaaggcgtccagatgggagagtgtagacttccaccgggcatgctatgtggtcgcaacaagacatagcctgtgtcccatattaccaagggaaccgaaacaatgagccagattgtcagcgcagcagcgggcgtatgggtccatttgcgcgaattggcgctggtggtagctgggggtaacttggctagctctttcccgacctcgggggaggggaattcgcggggatggtgtcgcgtggagaccatgatggaaggggttgcaatgaataatgtgagtaggacagagtcgaatgcaatcctaataaaatttactatgagagggggaaaagttcaggtagaaaccagtcaggcgcagaggaatgccgggggttacagctcaggcgcgactgacggccaatgacgtcgagggtgatcgtttgccatttttcacccgacggctacttgcctctcgctctcacttttgtatgcggttgaattggaaatctgactgcagattttggaaattagcgtgaatttcgttgggtacgtatatgagcgtgtcacatatatacattacatatgttattgacgcaaatcaacacacatcgacagtttacggtaccacgagctaacttttggcatttagtattagtaccctggaataactggttaactaattagctctgaatccgtttaggtcatcggatcgtaaactagttatcaaactcgggaagctgccacctatcgtctattctttcacatctctactcatccaacgtttcaggtttatcaagttaccaaattatttcaaatgatcaaactacacgccatcggtcgtggcgcctgcggcactgtatgggcatgcgaaacaggacccgcatacaaaagggaggacggtaacccagcacgatccctccaaaacgacttcgaaatgcacaatcgagtacttcaaagtcgacaaacccttatgaacccgaggaagtcgactcaagttgaaatacaaataccatcctgtcacaactttatcgagccaaagaacaaggagtggtgggctgcacatctagaaagggttccacaaggctatacatcatgcaatatgatcggagcaccaacgcattccaccctttgggggatcaacccgacaccttcttattcaagcattctacccggatgagatcaaacaaattattatcgagagtgagccggatcgagactgcttaattcgactatatttaggcaggcgtcgaacacatatccaggattcgaaaaccttctcacagttccgagcattctctttgcgaaattacccgctacatgaagaccaactagaagagctggcgatcacaacagacgatcttcaacaatatgcccgaacaatggcagaagcactcgctatgatgcactggattgctggcatagatgctaatgatgttgagtttgtcctcgcaatctacaatgataacgatggtggtcgcatcaataatgttttgggaaggcatagcatgtggatgctagacttcgatctatgtagaaatatgacaatgggcgagaatggtgttgcaaaagccgtgaaggccttctagagaaacgatcctttctatcctcgtccgggaaatgccctatgggacacattccgagagaaatacatttatataccagtgatgagtgcctggagctttgtggcgttgaagaaagggaaaagcggcgattcctgtcgaggttgtttattgaacaagtggaagcctggggcaccaatgccaactcttgaaagtctgtggcagcctgaataatttatctgtggacccagaggcaaaaatgtagggcaagcatcatagcttgagacactcaatagtaccacacactgcacaaagagaatcgtaggaagattaaatatgtagttcacgtgacttcaagaaatgtccacgtgactgctaaacagcagccataaaaactaggcaacgacgtgaaacatcatttcggaggtgatttcggagatttcccgaactcgaaattcaaaggagggactgtcaaactgcccactactcattctaatgtgtgctttgtatgtcaagtttaactgataggaagctcggtcatgctccacacttcggagtcagcaactgatggattcaaccaaagaacagaaggtcagtcacatccgttttgagtagatgcggtcaatctaactagcatagaagaatgtgcgactcgcacgggtgcgtgaaaaccagcgcaagagtcgagcccggaagctggagtacgtgaatgagttagagcagcgtcttgcggtgtgtaaagaacaagcccgccaaaaagacatcgagcaccgactagcaacgcaaaatgtcgaagctgaaaatcggcatttgagaactcttttgggatcgctgggagtttcgagtgcttatgtccagcagtatctgcaggaagcggatacgggagtaaacaccaaccggaaggttgctatccccgccattcagcgagtagagagagataatcctctatctctatcgcttcgtgatactcgcagatcaaatttgtcgatggcagtaccgcgcgtttacaaagaggaatcaaagacgactgaactaccaacagcggttagtagtacgtgtgccttgacagtggtgcaacgaacagatcagccgtcaaagcaaaacccccaagaagaagatccggctttgtgtggatgccgctccgagagacagaatccggaaacggtatctgacgaagatgtgctcaattcgacgctgtgtgccattgcagaagaaatgatcaatcaatacaacaccaaaggaattgatgtcgatgagatccgacgaagaatttggtctgggttccgagcaggtgcaaatggcacaggctgcagagtccagaatcacattctgttccaagtgctagacgatatcagcagtgatgtctgactttggcattgacctggcttccacagtcatttgggatattagtatttgagtgaaactgctagttgcagctgcagctgtctttgaatttggccaaaggcacgaggatggagatcacagtttctactaagaatcgcttgcaatcatgtcatcttgtcatctggaggagtgagccttgagtataacaaaaccggtctagaacccaccaacgcctactaaaccaattgctctgttccgcactcctcggccccataccctgaatgcgacgcattctatgcctcaaaattataccaatatgtgggaccactctacaccgacaagcccatgcaggatatttctccggtccaatccaccccacccccagatccagatgaaatgggcaacagtaccccgacttgcagatctgaatgagagatggataataacccatagccatcgcattagctatgccgatgatgcaaatgtgtttcatattttccgatgtagcatcccaggccacaaatagcagctgaattaatgagcaccacctatccaaaaagaattccagtcagaaagcacaagaacaagcccatcacgctaatagtaccccgcaaaccattcgctcctgcacgagcccccagactgctgaacacccaaccggcaaaagccctggaactcaacaatattgagccggaacattgataattagccggtaacaccgatgattagccgcaaatcaggaaaagataactgcttggcggtgcattccgtgagggatcagcgttgttcctcataagtttttctaattgcgggcagtagagttctgggatagtcagacttacatagagaggtgttggagcatccctaagtcaatgcggggtccgatctccacggcagcaaaaaagcctagctacggatggagcagtccttgttgtgccacaaagatgtttgtgtaggaaatagacaatgcatttatgttagagcgaaacatacagcatgctgtcttgaagccgaacagaaatgcacggaacacttttgtaataggattgttagcattgttagcattgagaattgagaattgagttcaggtgtgcttccccacactctctcgaagtaacgtaataagaagggtttccccatccggcaggacgagcggtgatcagttggacgtgagaagatggctagatcagattagaatattgaaagtcatctccgtatatttatttgatcaggtaagagtggtgaggtatctgccacggaatggttaggaatttaggatagccgacattatgtgtactccatagttctactctgtataccaccacagcataagaagctgaattccaagaagaattaccaacgacttttttgcttgttcaatatataacgaataattagaattagaattagcggggaagaggcgcgggcgcggtgttacgatcgtcacgacgtcgacgtgagacgccgatatttcgccgtcgtatacggaatcgaagcaaggcgatggattcggaaatcaatggctctagaagtgtactccgtatgctgtgtcgtgtaaaacggagtggctgggtaattctggtgatgtacttgggaaaggggttgacttctcaccctgcgtttctccttgtctcgaccagccacaatttgtaccttgtgtcccctttcaaggatgagtgtctctccaacttcaatgagactacggagtacatactccataagaataagtcatatccaatgataggacacgatataatgtgattagtgggatagtgcatattttgtcgatccttttctccatttttattatttttgttgatctcatttgatctcattttatggagtagatatatacgctatgcattctattatagcccctgtgagtaatcaggaaacagaacatttaagatcccagtcttcccctccgagatctgtggcttgttccttcctcacgccctcttctttcaatacttgtgccctgtgagatcctatccagcgctttcacagtaatgaagctcgcgtggtttgaggtagccgccttgtcggcctcggtgaccagtgccagtgtgagtccaatttaaacggttgacaatatcactgctaaccaagtcacatgaaaatagtccctggcctattctcctccatactatccctccccatggatgactggcgagggcgagtggtccgaagcatacacccgagccgtcgagtttgtctcaaacctgacactggccgaaaaagtcaacttgacaaccggtactggctgggagcaagaacgatgtgttggtgagaccggtagtattccccgacttggcatgtggggaatgtgtatgcaggactctccattgggtgttcgctctagtaagcttgccagttccaaataagcttgtcgttgcagttaactaatgagactggaacaggtgattacacctctggtttcccctctggtgtcaatgttgccgcagcatgggacaagcgacttgcctaccagcgcggtgtggcaatgggagaagagcaccgtgacaaaggtgtggatgtgcaactgggtcctgttgctggccctctagggaagaaccctgatggcggtcgtaactgggaggggttctcgcctgatcccgttttgactggtgtgatgatggccgaaaccatcaagggtatgcaggatgccggtatcattgcttgtgctaagcacttcattggaaatgaacaggaacactttcgtcagcccggcgaggctcagggattcgggtacaacatcagccagagtatgagctcaaacattgacgacaagactatgcacgagttgtacctctggcccttcgtggactccatccgtgctggtgttggctctgtcatgtgttcctacaatcagatcaataacagctacagttgcgcaaacagctactccctcaataagttgctcaagggcgagcttggcttccagggatttgttatgagcgactggggtgcacaccacagcggtgtcgaatctgctctggccggtctcgatatgtctatgcccggtgatgtaattctcggtagcccttactcctactgggcaaccaacttaaccatctccgttttaaacggtaccgtccccgaatggcgcctcgatgacatggctgtccggataatgtctgcttactacaaggttggacgtgaccgcttccgcactcctcccaacttcagctcctggacccgtgatgagtacaacttcgagcactctatggtaagcgagggctggggcaaggtcaacgagcacgtaaatgtccagcgtgaccatgcccagatcatccgcaagattggctctgacagcattgttctgcttaagaacaaggctggtgcactgccccttacccatgatgagagattcatcggcattataggagaagacgcaggctccaatgcctatggcgccaatggctgcagcgaccgtggttgtgacaacggaactttggccatgggctggggtagtggaaccgccaactttccttacctgattacacccgagcaagccatccaaaatgaagtcctggaatacagtaacggacagaccaacgtcttcgctgtgactgataactgggccctcacggagatggccgcccttgcctcccaggctgatgttgccctggttttcgtgaacgccgacgctggtgagggatacatcagcgttgacggcaacgagggtgaccgcaagaacctgacgctctggaagaacggagaggagatcatcaaagctgctagtcagcactgcaacaacactatcgtcgtgattcacagtacatccgctgttctgattagcgattggtatgacaatgtcaacattaccgccattgtttgggctggcttgccaggccaggagagcggtcggagcttggtggacgtattgtatggtcgcgtcaaccctggcggtaagactccatttacctggggtaagactcgcaaggactacggccctcctatcctcacggtgcccaataacggtgtcgatgctcctcaggttaattttgaggatggcgtcttcattgactatcgccgtttcgataaagacaatacggagcccatctacgagttcggttatggtctgagctacacaaattttgccttctccgacctcaaggtcacccctctagcctcatccgaacagcgcgagtacaaggcgacgactggaaagagccaaaaggcccctgttctcggcgaagccggcaaggtcttggataacctgttccccgagggaattacacgcgtccgccagtacctttacccgtggttgaactccaccgacttacgtgcatcgtccggtgatcccgactacggcatggactccaaggactaccttcctgagggtgctaccgatgattctccgcaggaccttcttccctctagcggcagctccggcggcaaccctggtctgttcaaagatctctaccaagtgaccgccactatcactaacaccggctccgtaactggtgacgaggttcctcagttgtatgtctccctcggcggcgatgataacccctcaaaggttttgcgccagtttgaccgagtcaccattgcccctggtcagaccctgcagtggaccaccactctgacccgtcgtgatgtctccaactgggacgttgcctcacagaactgggtgatctccgacgcccagaagaaggtgtatgtcggcaactcatcccgcaagttgccactatcggccgacttgccctcggttgagtaaatgatcttcctttttggaatggaaactggaggataactacacatgtccacatgagtcaattctcttgatgttgtacagccaacattgcgtttttgcacatattctctttttctcaagacatggctcctgtgactacttccatagctaatgaaactcattaatatctcttatgcagttcgttcacagaggcatccaattgctatctgcagaaccatacttcaactcggacgtaaaagccagacatccattcaatctgcctctcaaccatatctctcacaaatttatacaccggtaaacccgtaaaatgcaatccatccgtgtccacgcagcaccaccctccgcaacaccatattcccaaccaaatccgaccgcctcaaaccagctcctaatccatatcaaatcaacaaccataatctgcagcatgctcacatgacccgataaatacaccgaatttacaccatcccagagcacgacttctcaggcacagtagcatcaatctcccaagcttcaacaacaaccctgaaacccgccgtcttcggcatgacctccatagaccgcggctcaacatggtcatcgtatgtgcttgtcacaaccaatgaagtcgcactcaaaccaacaggtctcgggagggaagaggctgcggagttaccgctttgcgcgcagacggcgtacgaggcgctctttttgcatgcgggtcttcaacttccgcttttgggcaggtgtgcgctgacggaaccacagtgttaccaggaacaggatcaccagcatgcttggcagttgggagagcgcgtgcttggtactggcgctgcgggtggtggtggtggtggtgtttttctcgtgcaacttgctgcgcatactgagatgcatgttgttagggcgggtgagtctgttgcgagattgggacgttttgatggagttggggatgaggaggttattgagtatgcggagtttgtgggacgtccaccagggtctgtttgatgttgttgttgatttggtgggtgggtatgtgtcgcagcggtgttggtagtctgtgaatgaggaagttgtcttgatatctgttggtttggcgagcttttgttttgtcgaggttcatacaaagcgtaagttgagaagtaatagagttaaagcgtgatttttttattcttgagggaagtggagaggtcttgcgtgcgcgacggcgagagggaagttgcagtcatttgttgctgccaatttttgcttataattatgttaatggaagggctgatgctcgagggaaggttgtgctttatattttagattcactagatctatgagcattgtagcaattccaaaatcactagagctcgcttaggtagaggttaaatcatcttcccagtataaactttccctggcaagctgtcaaaacgtcttcgcggtgtgcattagagagagatacacccctcaagttcaaggactgttcctcaaaagtcggtatgatagtgcgcaaaaatgccttgaaggaatcataggtgatttcaatgcaataaagattagttagggatttgttgtgaatttgagtgtaagacacgaagggcagcagagcacaatggtcattgctgcatatgtctgacttcttgagtttcctattggaggcaaccgctgcctctagaagagccgaaaaagctatagcatggtacttgtgtatggttttctgaggttcaatccgaatggctcgaaatccaagctgatgtttatcccgcgccggctgaggaacccggcatcattctttgcaattggatttgtatctcgggaaaaagccgagtgcttaagctgcaatcttatgatagtgtgattcttaagcgtatcggatttgattatgttgagatgatctgccactaaagcctgatatgcagtacgctaagcattaatctaggtgacagtattatgtggcctgtctctatgtgaagtggtgcacacttgaagaagtcaaggttcatcttatgaaagccctcgaacaaggatgatacagtccatagctcttggactcgtgttcggaggtcaacccgtttagtatgagaggtctgccgtcacaaattatcttttagtttacaatgcctctttcaaatccatcacacttgcggagacccgattattggtgccagatagcactccagcagaatgtatgaccaggtatcgacctccatcctccgacagcactcgtagagaccgtgtgtagccgtgctcttcgggcgaagtgatctctgtccactctccttcgccaagagctttgttaatgaacaaagtactctgtgtgccagagctggcgataatagtgccatttttaccaccgtatggtgtccacacaacgtaaggcgaagatgccggccgagtaccactcgagacaactagacgctggcctggggcggaggcgattttttcggggtcggacgacagacggtagtatatagggaaggagtagcttgatgtaccgaaaaaagagccatactcatatatgtagaagtattgaccgttcgggagctagaaatgttagaattctccgggtatgacagaaacccatcgtaattgcattggtgtcttgggtttagcttaccttggtcagaactggcatgccgggtcggtcggtatatgtcgggtaggtgacatcctctacaatatctccccagttctttaggtcagttgagacctggtgaaccattgtctgtccgtgtgttgcattatcccgctgatccgagtaataacaaattaacttgcccttactgtgaaaggagttagggagttatttcaaggcagaatataagaacatactgagcaagtaggaatggctcccatacaggagtcagtccattgttcggcagtgcctctcctccggcagcgatatggctaacaaacttccaattcacgccatcatcttgcgacgcgtaaagatcgatgtgcgtggacgacaggtcagttggaatactactaccagctagaagtagagtgcctttttcaaatgaaccgatgcgctcgggcagggagtagaggaatggctggtaacgcaggccatatccgttaacagtgtcatggaccttggagatctcgttccaggtctttccgtggtccttggagcggtatatggggaagtaaaccgccggtggctctggagagtagttttcccatgttgcgagaaggtcaccattaggaagctgctcgttacgtgggtaaagtgttcgtgggacgatgtagtcggagggtggtgagaagatggtcacgtttgtgagcgggacaggagaagattgcttggagcgcgagattgtcactgcagctgtagctgcagcaaaagcaaggacctgtggaattctcatgtttggtacatatgttggaactggtattctatatctccattggcagcattatcctgcttttataaccgcatttcgtaaaaaagaaatacgggttgattttttgagatacatagtatcccggggttatcccaccggaattaaccttattgtggactaattggagtgtatttcatctgaagaatttccgtcaattacggccatcgtagataatccggggaaatatgaaatgacgacatcaattgccaagatatcacgtggcatcacgtgatgaagaacatggggtttccaccattccttcggggctataccccgtcaggatcgggggataacctcgtatcgaccaaaatatactttgaaattcgaacctttgaagtccacgccaattgggcagcacaagcccccaggcagtttggccccatcatccaaagccaaatttagaaatgcccgaaaagttgaccaattatgagtgtggatctacattattccaactacgttgcctatcagcacacagccttacagcatcgccacgttttgctggcaaccaacatacctgaaagtggttgattgggaaaaatcgggctatgtatcatgagaaacttatttaccttggattgcctccatctttctgtcttccagatttcacctttctccaagacatccaagacagaaatatccgtttccaagttacaggtgcatttgtcttaaaatggtacctaccgacttcgcacaccggccaaaagtccagttgatagggaaactgcaacaatcgacgagggacctcatcagtcgttcaacggccatgtgggataattcaaagtatcgctaccatcaatcgataatggaaatcaggcacaaaccagcaaacacaataaataattcgacggataggtgtcaccagtcaactgaattgatgctatatcgaccggtatcaaaacggaatcagtcagcagaccagttacaccgagtcgctcgtgttgaagacacaacacaacaggttggagcacgcgatgggcaaacccaagagcaaacgcccccacaatcacgattttattcacgggcattcaactcgcagtcaacaaactcatctccaaatcccaagaccacgtcacgctccacaaaagtgaaatcaatcaaatctgcctcggtcaccggaccttcactatctctggaggagcagatcggagggttttacaaagcaactatacttgtcaggtccgcggtgaagcaggcaagacagttgcgggatgataaaagagcactcctcggcgagatcgagcttgagtggatcaactcgaccatcaccggtgccgaaactgccgccaatgatttagctgcgtctgtgaagcgattcaaacagagcagcccacagaaccgctgcagttggaagcgtcgtgactacgaggtcaccctggaaaaggaatcccgtgtgcttcttgctcatgacaaagtcaagacggttcttagccatcttggctcactacaactcaccttgggcaaggatgaattatttttctctccatctgaggtttcaatggtcgcttctgcgattttggaacttccatctgagacgactgttctatctgactttgagcttttgcctgtgaaacctgagcgacctataccgaaaatcgtggtgacacaatatgatgacgataatgaatactcccatagctatcaaagttcccctccaagctacgaagcaagtggaatgaatgccatggcagagtttcggtgatcgtaccactgcatggcttccgaacgctgaacaggagcggtgtgattgttctgtaacttatgatggacgatacgacatgaataatggatcaaagttttggctctatagttacattaaattcccagttcgcaagcttcttggcttatgtcgatccaatgcttctgcctggtcaatgaaatctaaataaagccacaccgcaaaaatacacccaaagtggacactgcgaacaacatctaaagacgcgactgagtattaagcgcgttgatctcctcaatcacagtgtcgactgcctcaaccgccattccgtatccagcctggtaaccggttccaccggcgccatagttatggacaacaaccccccgacgtcctgaagcgcctactttcacgttctccctggcaacgcgagcgccaccctcgcgggatgggcgtagcccagcaaaagcaccaagaatctcagtctcgcttgagtttagagcaggaagcaaagccgttgttcgagtaaggattgattctgactcttctccaaatgtatccggtgtactgttgatatagttcagttgctgtcatatggaacacccgggagaaaatcccaatggactaatgctactgggacaaagggctgaaaggaacctacttacccaacattcttttgcatgaatccaccaaggatcacttttccattcgagtatggtcgaggtatcacgtaggtttcatagtccttaccatgtctcatgatgttttgttgaacatgaggtgcttttgcaagcagaatctgacctctggtgggaaaacactttgagtcttggactcccggtaactctttcgctgcattgccagtgcagttgaataccaccttcgtatccgtgctgatatagccggatgagactttggataactttttgcgaatgactcgcaccccatattcttgggtgagcttctggaacaaataccgaaggtgcattggtgcattgagagttattgttgtgaactctataccaaatgcaacacccgctggcaggtcgtgtgtggcaatctgtttgaactgttcgatggtaatattgataagcatatctagggtaagcaaggaactcatccataactcacatctttgagatactcgaccatagaatcgatcttctcatgggctggaagctcatcccaatactctaccgatggtgtttccttcacaaatgcattcttgccatccttggcagcaagatcgagaagatacatatatccaattttgtcccaccgcaacgcatttgggtcgcttgcagaaatagcagagaaattggcaccagccctgaattcgggttagtcgtttgaatgtgaactggcagcaggagcccaacataccatggtgatgtgtaatttatggaagtatctcctggaagatgttctgcaatgatggttatgtactggctatagcccttttcgcagagaactagggctacatttagcccgatcacgccggcccttacaaaaatcagtatcaacaccccgaaacagtcatgtatgttttggctctcacttacccgatgaccactacagattcgcttttcatattctccggtagatttattgaccttgaatggaatttagtttccttatttgtcccttttccgctccgtttgagagctttaaatactttacaatcacagttctttggattagatggtctgattgatttaaaccgcggcaaagtccgcggtccatcccccgcgggctaattgagggctccgattggcggcatggctagtggggacggatagggactggcggggacaagcggtatcacatatcattggtcaatattattctaacatcgatgagcctcatcacgacggacagtgatttcgacgaccgatggggaatcattatacggctatggaggtaactctgaaaaggaattcgtttgctcgggaaattgattcaattgtgcctagaacccactttcaaagaagagagagagtaaacagagggcaaaataggtaaagtctggcgtgttttctttttccactgtctttcatgagatctttccaattctctcagatatagtaagaagcacaagatctggaattttataaaccactctagtcctacagcagatttctaccgtctatgatgaaatcatctcttctcaaaatatgatcgctcgagtacgactgctatcccaattctaatcggagcctgctaacgtcttcggtcagcgggctggccacccgtagacctcaggcatgtaagctgattgaccgtcccaaaacacaaagtaaatgcaacgttatatcttggcaaccacgtttctatttagtttcattacttgtcgatagctatcgacaaccattctcagtagtatatatcaatttcagataaatcgaaaatttacattattatggtattgaaaattacatcactgaactctagaattatatcacagtcattacacatctttattaggtttcttgaaacttcttcgagtggctagatataaaaaaaaatctcgaggctatagaaaaaaccccatttagaatgtcattgttgatatagttcaatatcaagttgtaatttatctcattcataatttagctactggccagcccggggctagtaacatccccgagctggaacccaggccgcttaggcatcgacttcgggaagacccgtagacgttttcggtgtcaagacccactcactagtcctaggtagcccgatgtaattttagttatatgcccaacatgttccatatctaattagctcacgtctccagggttctccctcttacggtatactcacttcttcttctatacctgtccgttttctccaatggtgcatgttgccgtgcttccacagccaatagaaggactcatctggcgtgaagataagaacttgctaatacccaatattggcaatgatctcatataatggaaattattaaaacaacttcaagacttcaagtatcaaattcaaataggagaaaaaaaatgcctcagggtagatgcggagatacctcggcggtgatatctcggtattctgtcgggtgagaccggttcacaaatttcagacgacccctacttcacatgtcatcatataaaggagcgaaaccgccgcgcaaatacaaatcaaacttgagatcaataaatttacggattgtcaatacatcatgtttcaacatattgatcatatcggttcacaagaatcgatccctagaatgagcaagtcagagtcctcctccgtcgtgaatctcaacgccaccctgcaggagtcacatccttcacctctccagcgcttgaaaaaacattggaaggagataaaaaaggagtggggacctctcatggcggccaaagagagcattgatgacgagtacactttcccaccgggccgttattgtggacaagcgcacagatagcttgacaatggtgagtgttttacagtctgccgcatacatcataaactgatctcatctaatgttgttttgaagaaatatacaggactcaatattcttgccaagatgggaaaggagtggaactttttcgagatagggaaaggccaagtctttcctaatacttcgacgatcgtggccatacaagatatgcgaccttcctactatcaacctggccagttgttttccacaagcatctcaacttcttttctttttttttcatgataccgacgaaccccttcaaaataatggcgcttgctttgcgaaacatagatggggactattttccaacatggcgttacccttctttcggtcacatttcgctagcggacctcttgggatgttgaggatttgactatttccttcaagatagaacgataattcataacttataatattctaattcacatcataagtactgctgtctgcatctatatcttgctgtcgacctcgaatggagctactaagagaatggaaagaaaacagaaaataagagacagaaatgaatcagggtggcaaaaacaaacagaattacatattttcatttcccgctacagcgtatccgaagcgtatcccctagttaacaaactatagttacagtggtgtttcatgtgtatttgaccttgagtacttcggcctgggcccactttgtaggcccacttttaatattgctaggcagaaacctccgaaattcaatccaattcaattagagaataagaaaacagtgcagggcgcgcgaggtttaatatactaatatagtaggcggtctaaaatggcggtcggagcctaaggtgggactcgaagtacccaaggtcaaatactcatgaaacaccactgtacgatgaaagttctttgcctgagtatcgaggcattaatagtggggatgttagtgaactacgcttaactctaaatttagaagcatccatcaaacacaaattctgggatgtgaattttctattcagatcagttaggcactcataggtcctccgggtttctggccgtaaaccacccgcaattttgtgtacaggtgatgcgatgtatctcgcagctccattcgaattcctgccaacagcccttcaatctcggagcgtgtccacccaagcactcttgaaaacaacgcatatgtataaataggcatagcttcaagcatgttgagctgatggtaccgaccaaggtccttgagcttggggtctttaggccatggactctggggcagctattcatcaataagcaagcggttccattttcgttaagagatggcggaacataccttgtagatatcttctttgacattcacaaacccagccttctccatccgcgttttccaggatggggacgatgtcatatccttgccaaacatgcgcgctgattcatgcatgtgcttgatggataagagaaggttggttgcgccaaggtgagttccgtcgtccgaataagtgttgacgtcgaagctcgctatctcaaaccatccattgggattcaggttgctaagtacccgtttgaaaagaaggtcatggtcacggatggaaccttccaattcgcgtccatggatatagtcaaatggtttgctgtacgaccatggttgttcaaagtcgtcaatctcaaagcggcagtttggaggcaccctggacatatatcaatattatatagggaaccaacatagtagcagtggcacataccatgatggctgaatagcacttaggtcaattcctatttcaattagccaaagatttgatcaggatgtaggtagatgctcataccaatcacctcgcagtctggatttgtactatatttcttgttagagggtagactttatatattggagaagaacttgctctgcatattcgattgcccataagcctgttcctgtcccgagatctagcactcgctttggatttttgattggtgcctggaacaattctcctttgaggagcattaggtaaatgtggtggctctgttgctcattaaaatttttgtgtcatcagaatcagcaggtgagaactaaccagatcaagacggtcttgttcccgttcatcatttggctgtttggacattaggctaagacagagagtaatcgttgatagggtcatgtaccaaaatgtattccccttcatgatatgaatgatatctgcgaccgttctgtatctgatcagcacagttcgtgatccgtgatcaagtagcgttgtaacacacttcatatctgcgattattagcaaccattgaacaaatatttcagctacattaacatactgatagtccagcacgctcgatgtgatacttgtggtgtaaccggcattgtcaagtctatcagggtcagtagatatacacaccatcataagtcactggtcttacgaatcagggtatgatgaggcctcggcatcggactaatgatgttagttgaataggaaatagtgcacaaaaaagagaaacactaacgtcaggttcaaccggggtcgatccgtgttgtgtagctcgatgcatcttcaatagtttcggtctataggatagcacgcgaactcagcgaaagcgcgttataagtgatcgaagggatcaggaaaaaagtgaaaagtgaaaattgcaggcacaccgattgcagtcctaggaccccccttatgacccctctgtcttcgatgcagctgttagcgtcccaggttgtcgggtccagcgttaccacgttgtatcccacgatgatttgcaccgtcagccggataagtactcctttgagtaaagagggccgctgtaggacgtacttttttccttagagtacatatccccgtgcaacgtgcaacggctttgaatggcgttagttggataatctaagtggttaaacaacaatctagcgtattgatcgccctaagctgattagctcactcctgtgtgatggtccatagtgctaaaaaggggctgtttctcggccaatcaggggtgtattgcaacgggtggaggcccacaaggtgtaatttgtaccagccacgccccattaggtttggctgatatctactccgtactatgtatactaatccagcaataggtagtttatatacaaattccgttaatcctttgtgtagactcggggttgcaaagtcgaactcctactacaacgaagtccgtgcagtgaccacatcagggttagagtggggcggacaacgtaattgtttgtgagtatcccgtacttttgcccaagtcctcgtattcattgtcagaaaagtgttcaattcgctgctagtaacgcagtacttgacaccgtcagtcccgacaacttggtcgttcgccactaggcagcgtacatatgtgaaggaaagacctcggaactcattccactcatcctccgtgaagatagtcgcctcggcccaggtctcaaatatcttctagagttaagaaattgtgatccgtaactaacgcattgatgttattgctttggggatgcatataaccagtgctctagaactcgaattcttgggttcgaggcactatcacatgctaggtgtgtgatatttatttatataacttgtcggagacaacgagtaatcgcggaaacgcacaaggctacggacccggtacgataaatccaaagtgcagagagactgaactacttttaagtactttttacaggaggcgaagcagctaatcctaagtcgagaccctcaagaaacatatttttgaatgactacggtgcaagtattttatctaatatgtcatgcataaatcatcaatgaaagatatattaattaattcagcccagttctgcatttataagaccatcaacagcaatatctattagatgtattgataaagaacgttctatcaccgagggcaaaaatgatagttttttccttcaaggtatttctccggattttgctgatagaaataatctcgaattcataagttgcctagatgaatgaggcaaatgggtgttcaaatacccagcatcctctatcgactcgaacaaaagtccggcatcctttggcatggtcgcatgttactagtgcaataaagatacttttatgtattgcatcagtggcgctcacccatgtatattacccaacaaggtgatattcgctggacctgactcgtttccccgcatggccctttgttcagggatacaaagccggcctctggaagttgcatgcaatgaggtgaatatccctaaacgattggttggttttgccctaaacatttattgctctcgcgttgctttgattgattccattgcgtggtttcaacatcgagtgtgcctgccaaagaaggaccgaagtggccgtatttcaatttcttactctctaggtgacttcaacgtccattctgtgattactagcttgaaaattaaagcaatcgatcttcttatacagtacaagaatagtaggccacatttgtggcctctgtcgctgagaatgatatgttccagtatactagtcattttacatgttttcctttatatagaaagcttgctctccttaactttcctaagtagacaggcgcaggcagaaaaaggcttagattgtatctatagcctttggcacaagagcgggagatggaaatgaacgagatgtgcacaaaaactatatgcatcgaacctcctattgagtatcgctattgattgctgatgtcaaattactcaagtctcttgcttagaacagcaccgtaccagactgtagcaaccaggctgatcaaattgaccaaacttgagatgccatgcacgcggccgaacttcttgttcagagccagcatctccttggaatggggcgccgggtcgtagctcctctttccatcacgagtttctgcgaaggttagaatattcaattgaatgttacccaagcatggtggcagcagctaacgcaccttgatgcttgcgctcgcgcatcacgttggtggtgatgggacgcaacacgaacatgttcaccaatccggtcactgtcacagttgccagaggcaagagagtgttaaggcggttctcgggtgcagcgagacctgacagacccaatacctgtcccccgtgggaagcggtcaaggcgaccactataggtagcgcagattgcagtgagaaatatatggggaagatggcggtttgcagattagcaaactgaggccgcggaagggcgcggaaagcaacgaagcctccaacaaaagacttcggatatgtcagacaatgcttttagaggcgacgattcgaccatgcgtccggttcagatattgatctcacctggaagaactgtgtccctagaagggtgccgtagctacctcactcattagcatatgagccatgacgttcgctaataaacaaaccttagaacgtgataggggcgaggatccatgatttcggatatggtatgaccttggggaagttgagttgagttggcgataaagttgatgtgaagtcgcaacgaggggaagaagtggtaattatcgctacgacccaattattaatgaaaccattatttccactgccaatcaagcgtatctgacttctaacgacgcacagaccaccaaaaaccgacaaacacagcgtgtgatgtcatgtgccttcgtgtttcggtctaaaccgcaaatggaaatatcacgcgtctgcctattgtctttgagcctcgagcaattttgacttgccgttttccccaaacaccaccatcaccatcatcatcatggcggagaaagaggctacagtttacatcgtagacatgggacagtctatgggcgagcgccaccacggccgtcctatgacagatctcgaatgggccatgcagtatgtctgggataggatcaccgccacggtatgcgacttggctttgctcaataccaggacactaacaatcctaggtggctaccggccgaaagacggctacggttggcgtggtcggtctcaggacagatggtaagtggtagcctaccagtcagtacccattgggagccttgtctcatgttcggagtagaaaccatcaacaacttggaagaagagaacttctctaatatctctatcctctttgggcttggtcagtatgtgtggtttgatgagttgactgtttcatgtcgggtcccttgactaaatttcctttcagggtcctcatgcctgatatccggaaactccgagagacgatcaaacccagcaatactaacagaggcgatggtatgtgacagatgaaatctcatcaagctgctttttctgacattatacaagccatctcttctattgtcattgccatgcagatgatcattgagtacaccaagaaaaacaaatacaagcgcaagatcgttctggtgaccaatggtaccggtatgatgagtgatgacaatatcgaaggtatcatcgaaaaaatgaaagaagtcaacattgagttggtgatcatgtatgttcctcgtctatatgactccgcattatgctaataccatccagtggtgccgattttgatgacgctgagtatggtgtaaaggaagaagacaaggacagtcgaaaggtattaagccgtcttcaatgtattccaatattcatgttaatcaagttctcctcaggccgaaaacgagactcttctccgaagcctgactgaggactgcgaaggtgtttatggaacgctagaacaagctgtttcggaattggatattccgcgcatcaaagtgactaaaagcatgccatctttcaaaggcaacctcatgctcggcaatcccgaagagtatgacacagctatcactatacctgtggagcgatacttccgaacttatgtcgccaagccaatctcagcaagctcgttcgtgccacgctccagcaccgaacccggaagtcaagcaccggttgaaggcaagggtgaaggtgaaggtgacgctcttagctcagtgcgaacatcacggacatatcagatcacagacgaaaccgccccagggggtaagattgacgttgaacgcgatgacctcgccaaggggtacgagtacggacgtacagcagttcccatcgagcaaactgatgagaatgttgcaaatctacaaacatttgctggtatggggctgatcgggttcgttcagaaggatcaggtgtgtcttcatactaatcccatgtgttataccagctaatcccgtcaactagtatgaccgttacatgcacatgtccaacacgaatattatcattcctcaacgtgcaaatgacaatgcgtctcttgcgttgtcttctctcatccatgcactgtacgagttagagtcctatgcggttgcccgattggtgaccaaagaatccaaaccaccaatgcttgtattgcttgctccatctgttgaagcagactatgagtgcttgattgaagtacagcttccatttgcagaagacgtgcggtcatatcggttcccacctttggataagatcataactgtctctggcaaggtggtaactgaacaccgaaacctcccaagcgcagctttgaaagatgcgatgagtaatttcgtggacagcatggactttattaccactgatgatgatgggtaagtagagttcacttgattgtccagtcaactagctaatcaaaagagccagggaacccaccgacgatctcccaattgacgagtcattctcaccattactgcaccgtatcgaatcagccgtgcgataccgtgctgtccatccctacgatcctgtccttgatccctcagagcgactcacccaattcgcacacccctcggaagagatggccaagaactctaagtcccatctggagaaattgatgtctacggcagatgtcaagaaaggtgaaccctattcttaaaccccatacattcagaagagcccctactcaccaccgaatttcgttctatagttccaccaaagacaaaaggccgtaaacgccaacgcgaaacagagaaacccctctcaggtctggacgtcgacgccctcctcagtctcgaaccaaagcgaacgaaaatttccaccgagaatgcaatcccagagttcaagcaaacgctttcccgagcagaaaacatcgatgcaatccacgacgctgtgcagcaaatggctaagatcattgagacccagattacgcacagtctcggtcactcgaattacgaccgtgttatcgagggcctcggtactatgcgcgaagaactggtggactacgaggaaccagtggtgtataatgactttgtgcgccaattgaagggtaaggtgctgcgggaggagctgggtggggatcggagggagctgtggtggtttgtaaggaaggggaagctcgggcttattgggaaaagtgaggtggatagctcggctgtcgaggaagaagaggcccaagaggtgagctttgatttcttagtggggagtagaacgagtgctaacgctgcatatagtttttcgctaccaattgaacggtcgagtgggtgacaatctatggtctcgatcttggaacacatgaaatagtgcgtatgcgagagatatggaatactcatgatatttttatgccaaatttacccccatgtagatcttgttgcgtccgtgatgttatatagaacgcggttgaagcgaaacaaagttaagagtccacctcagatgactggattcgataatactgaccatctagatcgagggatacaaaattaaaagagtttagggagaaatgggaccactgatggagctcatgcaatattgccatatcgacgtagaattgacacatacaggagcgaaacccgcagacgaaaacatgtggcacgaaatgaatcggtacccaattgcaaggcatctgacgattcgacaacaaaaccaaacgccgcgcacaacatgcccaataataaccagtactcgctcgagaaaacaacaatagaccgagatttgcaaactccaacattaaaagcatccagatgcatcacggaaaaggggtatgcagaagtattgcccggatgggacgagaagaatggaagaagcgcctcgaggaaacttgcacagttccttggggcgaaagaagagagcaggacgtttagtggatggtcttgattgcccgtgcggggctgatggtattgctaccaatacggccactaggcttacgaacaccgcgagactcgctgcgggtgttttccgttgccctgcgagggctggagcgaatcttgctaaccgaaattggggcagcgccgctcttacgggtcacaggagtcttgggtacagagtggtcagcccagttttcctgatccttgtggttgtcttctgcgagggtgtagctggctgtgacggtagcagagtaactgatagaccgtgatgtgggtgaggcaacaggagatctagatgatcgctgggctaatcggcggagctgaatctcttcttcgctctcactgctctcgttgctcttcctgtgactgcgatggctgcgctgctcggtttcaacagcgagagatccggagacagttcgggaataaggatggtgacgcgagtcctttcggtgtgacttgcgaggctggccaggagttggtgcaggaagatcctggtccgggtaagttgcagcttcattgtgatcaatctctccaagggctgcgcgtttggagtgactattgtttggtggggtggagacaaccccgttactagtgcgcttcttagtcgacactcggggagtaacaggtatggactgtgctagcttctcgcgcatgctatcctcaaaccaccattcacggaaggcaccttggttgaggtggagccagtgctgctgaggtccaacgaccataccgggtcgcatgaatctcatgaaggcaattacttcattggcggtgaatccatacttgtagatcaggtaagcgccaatcaagcagcccgtacggcccaagcctgccttgcaatgaactgcgatacccttcttcttggtagttatcatctcatgagccatcttgataaaccgtctgacaagctgcaggggagggcacgtgccatcctcgaaaatcatgtcaatatgggcgattcccattgcggtgaaataagacgggcagtagagctctgagttgagtcgtacaacgagaccgacgttccgctggtggaaatgggccagaacattcttgaatggcatagaaagcttcgaggaagagatttccgagatggttgtgggcaatgcgttgtattcgggggtgctgacaggaatgggtgccacgggctcctgctgaggggatgcaaaggcaaggaaatccggcgtaacccagttgaagtcacccatgtcgactcgctcaaatttctcatacctattgaacaaaatcagtactcaatcttcggcagtataaccagtggcacttactcctcgagattgaagtcgcgaagtccgcaaagagactgctccttagccttccagactccataaacgacatcttgaatattcaaaataaaatctgcctggctgtatccagcatctcggaaaggcatgtaaggggggtctgcctgtgcgatgggtgctaaagccaaatgaggtggccaagattgaatcatgaccatatagcatgcaacaaggcaggccgcattggcgcgactccgggaatcagtcttgctatagaagactactgggcggtcgctgttggctgggtcgccaagaatctcatggaaaagcacggcaaatcggtagaggtgaccaatgtggagtgggccgaaatcagcgtgaaaggcattgtaaagaagggtgtcatcgatagtgaagtagacaggagagcggcgcttgcttggagtggcgggctgggcacgtgctcgcttgcttggggatttaggtgcgccctgatggaagggaaacggggttctggagctgggagcagaatcataagatgcaaggtataggcgatctaggtggtagtttttcttagctctctatactaggtaaaagacattcaaattgtccgaagaacgttgtaccaaccttggatgtactcgatcatctgcccgccgtgattgaagtcggtagtcatattgggggttgtttgttgacagccgcctagatctgcagtgattgtggaacgctggagcgaaggcgaatcaatatggtaccgttgcaggtcctgatgttgttttggggtgactcggaagatggcgaagccaatggtaagaaaatagtcgcggtaaaagtcagacctaaacgttcatgatcaaactgagggaaggagatctatgagcatagaatgttaaggataaagaggaaatgaaagcctggatgcaaaaagcctgtacaggtgaggggattggagaagaaggaaatcaacacaaagtccgagttcatgatgtttggggcagctgccatgccactgttatgttgtgccttacctgtttgggcctagttgcagccgttgacgtgacaacgccttggcctcaggcattcaattgtctgccttccgcattccaaaacatggcaaccacaacaaacaaacaatataaacaccacaaacttcacaaacgtcgcaaacaccacaaacatcaacatcaacatcactcattattagctcacatctcatacatctcatacatctcctctccagttcgtaccccgtcttcagctttgcctcctgattgcacattcccatggcaaattatatgtttggcgagtaattgattcatgtggataaacgagcccaagaacaaagcactcatgcgcccctctacttccatttaggtaacgagggccggtatatcatcctcgtgatggtcactgcggtatcaacctaaaacaaaccatcgcactgaaaggtgatgttcaagccgctgctctctaacactgcctgagattgagtgacctatctggtacagaatatgcagttagggcctccaagctgcattttcttaacacaacatctgctcaatacagcggcttcttgacgaaatttgcttcatgttgaatattctcgatggtgcctatcatgttcaatggttgtgacggtacaacactcgaccagtcatctccgatgatcctgggatcacaatctacctgaatgacgtctactgcattgctttgtttctgtaatagaagacagttgctgaatcaaaaaagaaacttcaaaaaacaacatagatggtcttcggtttccacttccacttccaacatggtgtgcctccacatgccatcaagtaccaagggcagggtggctgctacaatctcggcagaggctgtggctcatgcagattcaatgcaaggacatccctcggacgatgaactgtatttgtttcgaagccaaagtgttccattcacgattcagtacccctgggaatgcggtgatcgacacaaatttggggccccatataatgacccttgcctgagcctaccgtcaatcaatatacacccctcacttgaacttcgagagttccgggtgttgtggtattattcttactctgatggagcaatatttgacttgattccacaagttcgaatagaccatgctgaatctcccacgcaatattctctgtaactatgaggctgtgagatagtcaccccaaatatcctgcaaagaagaacaagcttctacagtttatcagcctgctttatccggcccaaccttgctgaaacttattcatctacaccactaaactaagacctgctactcatcctaactcgaggccatgtaggcacatacatcccttgtttcgcgcaatctccggtgaaatgaaactatctgcgcggctttctaaactgcagcccgttagcgccagtcgtgctaatcaagtaccttaatggacaataccaactacagtcaaaacatcggtcctaataaccccaaatgcgaggggctctcaacaatcgtgcggggcactgccaaaacaaacccagtgaattgtatataacccggcatttccatccaaatgtgtgtcaatttctatacacaagtcattcattcactttcagtcactcttcttctacctgtacacttcctacacaccaattcactcttttcacccgagactccacccacatcgaaacaatgaagttcactggattgaccgtttcaatcatcctttctagcctatgctactccaccgctcttcccgtccttggcaatgtcgagggtaccttttctagcatcgagggtgcggttggtggtgtcacaggctctgctcctaagattgctgcgcccattacctcagccactcacggcctacctggcactctcaagcgtgacgataccgctgccctcggtgggactgtcgagaccatcccaagcctggccaatagcgctgttactgtcgctggcagtgccgttggtaccggtgaaagccttgtctctggtgctgctggtactgccgagaatgcggttgccggctccgctacgaagcgccagctcaacgaccttgttggtagcactttaggaagcgctgttcctgccattatccaagaatccaaagccggtggcctggctcgtgccctcaagcgtgacgataccgccgcacttggcgagaccgtcgagaccatcccaagccttgccaatagcggtattgccatcgctggcagtgccgttggtaccggcgaaagccttgtctctggtgctgccggtaccgcagagaacactgttgggcatacttagtcaactcgatatgcctcatattatgtcgtttcttcccgcatgttggtcatttttcgggatttttcatgattattgatcgatgtttcgtgtacaaagcttcaaggtgtctttggcacttctataactctcaaatgtgttttcttctttgccttattttttccccagaacttaaaaccagtgaaatcgattgagtattaggattttctatgattttctttaggcgttattaggggataaaaataaaaaacaattgacgctttcttcaaaattttcgtttcgcaacagtttttgtctagccgtggtcacccaatacccgaatggggattgtcctgaaaactgacaatctagtcagcgtagttaactgccaagacatcaagaccctccattttccacctttctgtttccccaaaaatcttcagcgctactttacctgttcggaacataagagatgccttacactgacttccatcgaccgcattatgattcgaatccatccaccgtctttgttgactcagatggatcacaggtctatgaatcgccccaccaaggtctactttcccaaatcatctcacgaaacgattcggcagctctgaagtcgtataacgattgtcctcatacctatgtgttctggaaaaattacgaattcgatgaaagcaatccgttacacattgccatctacaacgacaatttcgatattctgcgtgagctcgtacagatctagtccttggatacaagcttgacacagcccttgcaagactacatcaaaagccatcatgtctctcctgttgtagaggcttgtgcaattggtaaccaagagatggtgctctggttgatgaaccataatccctcgtcagggacattggaagatcgggattcagaaggtcacacagcgcttttcagagcagccgagggcctgaaagaagtgggcactatgatgatgcaagcacaagatgaaggaaatgaagcgcttccaagaccaaatctcgatcagcgttgggcgcgtatataaccatttattggttggcttctgaacatgaactgccctatggagatggaagacgaaacgaatgaggaaaatgacaaacaactactaaaggacgaatgcgcctacactaatgttctacctggaactgtactcggtgaagctgtctcctacgcaagctacaatctagtctcacgtcttatttccaaaggagcagatcctcatgcattccagagatggcatggcggcaatagctttgctatagagaaagcggaaaaaacaacaccattacacattgctgcattgtatggaaatgccgaagccatcaaagctttgtttgagcatcgattacctggaaaaatacaaatagggtgtctatcgtcgatgatgagggacgaatcccgctacattgggccgtggcaggaactcacgtggatacaatcgactcttataagatcacgtcgcggatggtagctagtgtcaagttactccttgattccaacccggatacttttcacgctcgaaacaagcttggcgctacagtcttccattacgcagccaaaaacaacacaggtaatggggcaaatattgaggccataagcatacttctggaagctgctcgggattgttcagatatgctcaactcgcgaaataattctggggtcagttctcttggagagctaatcgattctcaccaactcattcccagtggtctgacacacatggaagggattaccaggcttctactgaaacacggagctgatgcgcggcgatgtgacgaggctggacgaaatattctgcaaaaattatgcagccttgcttggctggagccaatcagctcgacctttatagaccaattactccagcaacttggtgtcaacgagaaggatgactgtggctgtacagctcttcactatctcgtaaagaacttcgatcaagccgatgctatccgacactttttgagtcacggtacagatgtgaatgcagttgacaaggaagggagtacccccctgcacgaagtgatgaagggtacaatggttcggaaacgggatgaccctactagtcttgagcaacttcctatgcgcctcaagaatgcacaggataagatcattcaaatgctattgacttccgggcatctgaaggaattgtcaacggaaatggagaaacaccgagacaagtacagaagagggttttagaagaacgcgctcaccgattggcggcgcagaaagtcgcctgcggaaggggtcgaggaagagcagttcggtagataggatcgtgtttagtgcaataggctaccagtatgttctcattcacatcagtagtatcaaaattaaatgttccaacacccactttgatgcttgacctacaacgttaatcacaatctaggcgtactaatgtcatcgtttctatctgtgacaggaaccaagcattctttccgatcttccattacctacctcggaataggggtatgagtaatattccgcaatgtcctctggaatactctaggacatacaaacgtagaaatgaaagggttgacgctggaggtgtcatgctgtgtaaacctccatggctgtgcttgccaatcttactattcaattctgtcaagtctgtctctttttcttcttccctttcctcaatatcgcacccttggctttgacatgatgctttcacaatcttcattccctgacatgcctgtacaacccatcattatgaacacacctgattcaatgcaatccacgaccctcatatcactccctggaagaagaagcgaactcgacctgttcgcaaagccaagagttggatcgcggtacaaacgccaagaagtcaatcattctcgacgagttgggcgacgcattgattgaccaattctatatcgccagtctaggggatcgtttggagacacccaatgtatccgttgtcgagcatttgcgcaccagccttcatacagcaccgatttccgatgtcagctcagccagcagcagccacgccttgactgtcgtcgaaagccacgtcgaaattacacctgcaacaagtctagacgaggatgatacgtccctgggatcgcgctttccgcatcctctgccgtgatcgacctttctgaacaaaacggaacagccccccgccaacaagaacgatactgggtaaacgactgcattgggatagggctagcgtggtgcattttattaaggtaagctgctgacttggttaactagttaactagctgctctccaacttttgctcaggcaagcccttaaacttatgtaatactcaggcgcgtgatcagttttagttactcagtgagcaaaaagcggctaggggtaaacaggtcagcactaaagcggaaagggaaagccatgtcgcgcggcctcaaatccggtgtgtacaacatatgttttggatcgatgtcaggtccacctgcatgccttgatcacctacgcatatactagtagtacatagacacacaggtcactgagtcccgccatatatccgatcaaataaatatcacatatattgaatggctgctagtgacatcttaatgcatcttaataaaaatcttgactctccagggctagattgcatccatggattgattacagtcagcaatgatttggaataatgttatgtactgcataaatgtactgcttttgaaccaatcaggtgactcacgaacataaatcaggagacaacccaatcaacaatcggctcggacgacttcctattccgtcggctccttggataccccgtggccagcccagggccaattggtaagaaattgaaccaaccgaggtcaattcattatcaggagaatacaagaagaaagtcatgttcgcgtgttcgcaaatgtctactctatcacattctgccaagtctctccggtcaactttatcaacgacgtcatcccatttatccccgcggacactccagagacacttccctgttaccttccctattttccgtcaaatagcaaccatgtcgtctgctacatcgttcttcgactttgagcctcttgatagtacgtacaattcacgtggtgtaactgccaatattcttccctcatcataccccaaatataagctgcgaagaacctaatcgctaaccaaaccccgcatacgaacagaaaagggcgcaccctttcctctttcctccctgaatggcaaggtcgtgctagttgtcaacacagcctcgaaatgcggattcacgccccagtttgaaggcttggagaaactttaccaggacctgaaggcccagtaccccgatgacttcaccgtcctcggattcccgtgcaaccagttcggcagccaggatcccggctcggacgatgagatccagtctttctgtcagctcaactacggcgttaccttccccgtgcttggaaaactggacgtgaacggcgccaacgctgcacccgtgtggactttcctgaaggagcagcagcctgggatcatgggcatgaagcgcgtcaagtggaactttgagaagttccttgtctccgccgatggaaaggttgtgcaccgctgggcttcccttaccaagcccgagggacttcaagatacaattgttaaggagattgagaaggcaaaaaaggagggcactcttgcttcgttgaagaagagtgaggctggtgctgagcaggctaagctgtcgtaaggctgtgcttgaggtgttattttctgaattattgtggtgataccttcatctgtttcattgtatctatattctggtgcttctgcttgtgacatactccttttcggtttacgatttcggtctccgatggaaatcaaaccgagcagtaatagtaattcatatcccagtttcaaagctcttggacacctgttttgtaaaattcaccagatcagttcattggatctatatccaattctccttaacatgaggcccgacttggtggtatgcccgatggcccatgatgccctaaattaagcagaggaaccacccttgggaatcagatttcgtagcgacagatcgtagaccacatcctcgaccttcttgacctgtattgccacacaaattagaaatttaaacggcgaaatagacgctgtcatgttttgaacgtacgctgtacttgataccgtcgctgcgcttgcgcaagatatcgttcttcaagtttaggagctggaacccagcgaaaacttccttgacgaagatgccaatctgcatgggacgggtgtaatcacccagagtgactgagttgacagccaagcgagcctggaacaaattagctgtgaacagacagaaaagctctgagatttgggaaacgaaccagttcctcaaccatggcaatcagtgccagtaggtaatcctcaatcgtcaggtggaaggcatcctgctcctttaagttgacaggaactgatcaaagaaatgctagttagtattattgtaattaatgtatacatacagcacccgtggtgctcatcatagaaagagataaacaaaacgtactgtccaggaatttgcccacatcatcgatagtcatgaaagatgttgagctaggtcccttgtgctcttgcagtcctcccagccatgcgcaaagctcaatagaggcgacctgatagattggatcagcatcagtcttccgacattgaatttcagaacacaaaccaggttttgcagctcacgggtccatagcccgttgtacttgtagaagggatgttgatctgccacggccttcagacgagcaatctcttccttttgggcaaggatttccttagtgacatcgtcaagcacgggcttcactattgtagaagtcagcaagacggttcacgaagaatagaggattagtgtggaattctgcctatgggaaaagtgtgggaatttgaacgttgtacggtgaagaaaagagaagcagttgatccaaaggatgataccccaatcctctcatcagaccacagatagataatggatacttacactgatcagcgggcgtagaatgggcccgtgacaggatagcctgtgtggaacgccctgtagcattcaatatcagtcctcatgttcagcttcaatcccgtgggtgccgtccggacaggggcaggcatctggaaagtcacgcattgtagagcatacctcttctggcgagtgtgcggacaatctcatttagttcctatccaatattgttagctacctgtcggtgttcctagctcaagggtcttgttccggtgtaggcttggcgcgcgaagaattcaccgaagtcaggacgcgctttggtacttacatcccggacagtgctctcctcgtcgatcttcgcctggagattctcgaaaatgcgttgatcaatcattttgtcacttggttgtgattgtagatagatatttgaaaaagttgaaggaaggtgtggtgttagaagtgcgctacgtcaaaatccacgttgaaaaagaggatagcgtgcacaaaacaacgcaattatttgcttacatcgaaaatgatatgatgagatttgatattgcttttttaaatatattttactgtcggaggacacttcctccagagtaaagtgatctgaggcacttttcttttaccatgatttacgacgcagcctacagctaccacccacgaaacgataataaagctttggaggattttcagcttcttgttagagatttggatcccacaaagaatgaggcttgcctgtgacttgtgtctacccccgatcaaaacgattgcaaaagagactcctccgcagaaacaaaaaagaacgccagaaccatgaccatatttgcatattttattgttgccagatcaagtctagtgttcgtcgtaaatgtcgtaaggaagcgatacatacactggccggtgccagggtaatcacgcagcgatggaggcaatgcttagtatcggtatctggtcgagtaatctgcgaaaagtcggttgttagtgaaaggtgtttctattctaggatggatattgaatgtacctttggggctgaccaccagaccacggcccttcttggcgcccttgtatatcgtctcgatgatgtcgatcaactcctgcttgtcctccagcacccagttcaacttgttgttatttcctgtgccgaaatcgcacatcatgtgcttgttgcggtaaaagaacatgatcgtcatccggtcataaagctcgtacatttggttgaagtccgagacttggtcaaggtcgcataggtaaatgacagcgaagtctggggtaggctggttagctgctgttcggtttactgttggggtatctcggtcactcactctttacccgctcggcgattttgtagaggagctcatcttggcggatacctgggagaatgggttagccagggacggtggcaatatacgtagatagcactcacagtcgggatcatgatctcgcccgaatcggatcaccaccaggcgttcttcctcagagagtatagcctggtccacatgccaggctgtttgcaggtgagggaggacaattgaacccataacgatggctggttttgtgtcgataagagttcgcgcgatgggagaaatgaaaggcttatcgattgggccccgcgatcgaagctgttgtgtcatgtgaccactttggctgttctggacaatgttgtataactggggtgttgcctagactgttctgtttatttctcagtgcgctatgttagaaatatcacggtgattattctaaggttaggctgtgtatgacctcatccaggcgcctcacctaggcatcttgggctaagtactacactgtaggacgcattctatgaactacaacatatatcacagctggagatatacaaggtaaccccttgtctagactgtttagtctgttgtgcagttggtgtagatgtgcatgggtctaatccaagcgcctcggtatccgattaggcaagtacagtgtaggacgccttctaccgatgacagctaacagttagcgtctattcaaccaagagaaaaacaagagcatcgcagtttgagatatttcaataccccagggtctactccgtagtaaccgatcaatctaaaagtcaaagaagctaatgatgcggaaggcagctggccgagaaagtctcctaggttgattctttttggttgtattttctgatactactttaggagacaaattttacaagacaagagcccaatctatgacttcttctccaagtgcccggactagccgagcagttgatgaaaaagagttcgcgtcgatcgggggtagtgtaagcccaatgacactgtgcaacgaggcatgcgcaagcacaggggccaagtcgcgggatccaaaaataggaataatcaaagtgtttcctggacggaaactttcagagattaaactgaaaagaacagatactacacttgatctaagccaataggcaaagagagctgaagaagaaagaaaagaagaggaacatctgggggcagggacaccttcttatacacaaatcgatgtgggtctaccaccagcgaaattaagcgatccaatcggggataatgatcccgagactccggggatgtacctgctcaggctaagcgatagttatgctgactcacccagctgactcattgatccttgccctaccctatatcccaattgagcctagcgcaacacacctctggccgtgaatttttgctaaccaacattggctccaccgcgaaatttaggaagttgtcttgaccactctctcgccggcgcaggatattcacctctttgcgacctttcccaattccccaaaattcatctccccccaatccattaacaatggctcccgctgctgtacgttgaagtccaaatcgctttgctgttccccccaccggagtctctgcgggctcgtcttcgacaacactgtgaaactcggtattgaaaaatctatcgagtctcccatgttgtcgcaaccgaatctgcgagactaccaccggggatcgacattatggagcagtaggctaatttgattccatgtggtataggctcgtggtcgcaaggcccagaaggttacccagaagttcgttatcaacgcttcccagcctgctagcgacaagatcttcgatgtctctgccttcgagaagttcctccacgaccgcatcaaggtcgagggccgcgtcggcaacctcggtgaaaacgtcgtgatctcccagattggcgagggcagaatcgaggttgttgcccacatccccttctccggccgctacctgaagtacctgtgagtttatctatttcccgggatgcctcccgataggttggaatataattttgctgaccatttccttttcttcaattcagcaccaagaagtacctcaagaagcagcagctccgtgactggctccgtgtcgtctccacctccaagggtgtctacgagctccgcttctacaacgtcgtcaacgacgaggctgaggatgatgaggaataagcgtgtcgctcctgtcatgtattgtttctttatcccgttcatcgatcggttctagtctgtgtgtcgcgcttggaacgtctgtatggattgaaagcgagagccatgggggggataagattggtctatgaggccacgaataaaactaaaaaagtttataccctcattctcttcctaacataacgcgcatgatcatgtagattgtccttgtggtatcttatacaagacagtaaaaaataaaaaaccaacaaaatacgtgaattgaggacgagaaagagaaatacatatccaagatcacctgctgggctttctcttctgaaccgttgtccatgaagatgtcaaggctgatccttagccatccggacagaccaacttgcccccctcgattttttgtcccttcttcttcagctctttccatttctcgcccaccttcactctcacgagatcgcccgtagcaactgaatcttcctttgagtcgtgcccattgtctccgacctgaatgtcgcggccaaggtgcctttgaacaagggccttgagacttatccgaatggggagacccttggggtgggggtacaagaggacggtgtcaatcaccgtagggtgaatgatacggcaagcgttgaggtcgttgtcgattgcatgaccaataagaggtgtctcgggctggaggagcttcagaagtagattgcgcgcctctgcgggtgactgaacaagttgcaagggtgggtggattttatttttctcgtctcctaaggatgaatgtatgttggacatcggagtaccatatggacttgcggaagcatagtgttgtggtgtgacaccggaaaagcgagtgttgagatctaatacttcgcccataggccgaaccagcacatcaagaagatcatcgcctttaggccagctgactgcagtgagacgaatcagttcgagacctaatgtcgtgtagcccatctcgcaatcaatagagaccggctcaagtggtcctttttccggctgaggcggggttgtctgaaattggaggacggatgcaagtcgcttggtctccgagactttgaacacatgtgttttggctctggtacacccggtagacgttcccagtgcttcgctgcagcagggaaagtagggctgggagggaccggtgacatggtctgttttcttgcgctgagggtaaacaggccgtcctggatgatagtcacagtagccaccgctggccagggtaccatcttcacgacgacccggaaatacctgaaatcgttgaccgcatctatcacatttctcccagcccttggactcatcaacgcctctcttggcagtttctatatctgcatccgtgggctgctttgtgacatatccatgttcttcaagaccagtgaggggtgtgactagctgggatacaactgcaatttcttctgcgggggtcaggcctgtgttgatgggtctgggaatcgctcgcggcttttgaacggggtttatcttatagtatcgcgcgttcagatgggacatcacctctttggcccattcgtcgatacccatctttgtaactctcacgattcgaagtttgacaacattgccgtaaacgcttggactgtccctcgcaaatttctcttcctcgtcaagggccattgtgatgagttcgtcgggggttaggacaaaacatctattcgagctatgcttgtcttttcgtagcttctcattgagagcagtcatggcagagtgcaacttctggagaatggcagtccgactgccatgagttgccggtgcatgggcaagcatgcgaggattcaaagattcttttggggctttgcgagggggaagttcagatgaagatccagcagatgaggtattagtgcgcttcacaggctcgttccccaaaggctttggtgtgccatggtttgaggtaggctgggcggtttcttgagctcctggggtgtcttgtgtattttgattttgctcggaggcgactgatttcgatgagcggcgtcccatttcgagcgatgattctttcaagctgtgagatggaatgagggaccccagcaactgtgagttttccactttggcccgtttagaaggagggccatcgtcacctgacactgatatcttcgaacgccgagcctcagctggggttgggttattatcatgagagaatatgcatttcaaaagagtgcaatccttgcctcgcgggcatggaattgccccaaaaaggccgagcggcgtgaacatgatgaatggtcaccagatgagaagataggttaagatgtagaaatccaggtctcgaatgcaagagctagtaggccgatcacaatttttagaagtacctaacgaatatgtatagctatcgctgcccagcgatccttttgtgtttgttttgtgcactgaatagaccgaaacgaatagctattgcaggtagttaatgggatcgcattattcggcacttgcttagccaaagtgcattatatcaaacatagcaaccgggagatttgaaggtattgagaggtcagattgatatcacttgaggacaacgttggagctgttcagcgaagtggtaagtcaaggatgcaaagaagacaaacactcacgtaatgcctgatatttcaggcagaaacgagtggcatccagttcatctttatttcctgttgactcaaggtttgtctcgatgctagagagtataattctcatttcaattgagcctaaaactcctgcaacaatgagcacacagatctatgttgtacttgaggacttcgccggccatcgaagtcccttatcgccgatagctccaggctgacacggatgcggccttcgggtgaatagacatccggttgttgaataccaggctccttttcttccttttgcccctggaatcagttccattctcaaagacggaatcaaggaatgaaacaatggcaggtacttccaaagccgaccatctctgtgtcttagttcacgggtacgctgtattctccttctcaatgacgtactgacgagccgctaacgcaaatctccccaatagactttggggaaacccttcgcaccttgattacatcgcatccgctctaagagacagatatggcggcgaaaacctctacatcctctgcccaaaaacaaatagcggcaactatacctacgacggaatcgagttgggcggagaacgaatagtgcacgaggtcgaggagactcttgaatctctagccaagaagggacaaaagatcacgaaaatcagtgtggttggatactcgcttggtggtctgctcgcgcgctatgcgatcggcctgctcaatgcacggggttggctggataagctggaacctatgaatttcacgacctttgccacaccacacgttggagtgagagctccactgaaaggatacaaggatcagattttcaatgttttagggccgaggacgatctcggcatctggccgccaaatgtggctggtcgattccttccgggataccgggcggccgcttctctctgttttggctgatcccgagagcatcttcataactggattgaagaagttccggcaccgcagtgtctatgcgaatatcgtcaatgatcgctcagttctcttctatacatctggtctctctaaagtggacccattccgggatctggaagacgtgaatatcaactacgtcaagggttatgaagatgtcattatcgatcctgacatgcatgtgcttccaccggtggaaagaaaccccgaaaccgcagcagcgcgattctggaagaagataaaatcgttgactctttgggtacctctgtcactcttgatcattgttctctcgcctctggcttgtacactcttcctggtaaatgccgggatccagacgtttcgcagttcaaagcgaattcgtatgcatgaaattggcgaaaacggcgagcgctttggaagatacagagtaccggttttggtccaagatgttcagcatgtcgtggagcaggcctttgataacgtcaatgctatacaagaacccgcttacctgtccaacagcgatactgaggtgtctgatgcggcgcctgagaagcccgctagatcgtctgtctcgaagtccgcgcaaagcgatgacactgagtctgcgtcggctagacgttcatcaacgacggaggtttcggtgcattgtcctcagcttgcattgactcccgaacaatttggcatcattgattccctcaacgccgtgggaattcggaaatatcccgtccacatacagaagcaccaccacagccacgcagctatcatcgtccgggttgagaaggatgggttccgagagggtaagattgtgatgaagcattggctagacaatgagttcgcgttgtaattttaattagacatatagccgccctcgagcgttagagcatgcatgtatttatagtctcgacatttcatcaactgattatcgaatattactttatataactatagaatcatcctagcaatattcaaaattatgctcaattcccgaagagacacccggccaattcccttttgccgacttattttacggataacaacaacccaagcaagctcgtcctcgcaatataagtaccaccacagggattgtgatcgagcccagctatactcgcaatcctggtactaccctcttcagcactatcccgtggtcaatatccgtagtgcggcatcagcaaggtacactgtccctattctggggacctaggttggcatattagtgatggtatatcgggttaaagctggaaagttagtacccttataggtagttacctactgctaccctcctggatatatgtacttacttttcagtgaggaattatgttttgtctgtttagttttcagatcattcatttggaaagtttctttatcattgatcgttctggaatccatttcaggcttccggtagtactatgtagggaaaacatctaacccatgttgtaatttatctgcaaaaagaaccgtgccatgaattgcgacacaatgcagaagttcaagagaacaaggaacaaggaatcatatcagaacaggtcggggaaaaaacggaggaacggactcgattgagaccacgaaaccggttgtcgagaaaacgcagtcatgagtgaaagaagatcacatcataccgacttatttgggaagtgcttcgctgatgtcatagtcgagctcggaaacagttattcctttggaagtttttcgatgctcgcgctcgatagcaaacttgacggcatcaaaaacattatcgcatatctttctgggtggatagcgtgggacagcaccatcctggtagactccagtcttaaccagaatggagaaccagtcattttccgtagtctcgttaaattcatttgtgccacggatgtcggattccggagtatcgccaatgaagtacacggtagacggagacttgtcgatgccacacgagtcctttcgccacttttgcaaaagccgggtggcaaatccataggttccgagctgcggcttaccgaaagcagtagtgttgaggtctttgcctgtgatagccgcgtaaacagcctcgagggaagcgcgcagcgctcccatcccaagacgtgaatgttcatgcgatgttgaccaaaccacatcggtgtgcgagaagaagacaggtgggccttcagtgaagatctccgaccgtttattcaaccagccgtctttgctcatgaggcagtccaaaatgatttgctggtcaccagcccagtcgcgactatctgcaaagacgaagatcgcttcgatgcggaccttgtctaaatcgagcagccgggaattttggtgctcctcatccgtcagcgttcggaatggcgtagtatcgtgtctcgtcttaatgatatctccgggtgtgatgacatccttgaatccatatccttcagccacgacccggcatttttcaccctcgccaccaaccaccaggacggtgttgtatcgctctgccatttcgcgcatgggcgtgtggccacagataaactggccagggtcgacttccaggtcgagttgtttgctgaggtccaggcatcgctctttctctgtcttcccgccgccgttggtcaagaaaatataaggactataatgttgccgttagattcaaattccttttccgtcttttctttttttgctcgcaactgtttcccctcgccctgtcctgggtgaggaaccatggaaataacaccagggcaaatacttacactttgactccgtaggggttttcgccgttgatatacttcatagcatcaacggcttcgggaataggctcgccgcccttgatcagaacgccatcgatatcgaaggctagggcgaaatcatcgctagtaaccttaggagggttcgtcataggggtgttgattggagattcctcagatgatacttgatcctgcttggccatatttgagttgaagatattgtcaggagtgaaaatcatcgaatgcttaaagacgacgttaggcccatggagatcggtcaccctttgagttcctgatctatctgtggccatggaagatgaagggtgtggggcggcgggtacaatgacgctggcgctgccttgtgatgaagcgttataattacttcgcgtcaaatctcttacaaatgggtgccagctattgagctagctattccgatatgtgcgctgggtatgcgcttgaggtgtaggttgcaggatacaagcagatagagttgtatgttactgtatagagtagtggggggggaggccaagggtcattaatatagcccaaggccctaaagaaagaggttttacatcatcgacccttttaccccaaaaaaatggggcgttcaggttcagaccttgttctgcaggtttttctgggctaaaacaaaaccggaaaaaaagtgactatcgatccaaaacggcaggctacgagtcgggtcgatgacgctgatttggtaagaaaagaagcgcaacttcggatttaccaagtgcgcgggttgagggcagtggaggattgacaggtgtcgcaaatcaggaccaatcacgagggtaggatttgacaagatcagcccgcttcaagcctttttgcttgctttacacctggtcgctgctgcatatccttaggaagcgcctcttgcattcttcggatgtatcgcgtattttgaatttgacacaaaggccccgcggctgcacccacaggacatatcaggccattgacgtcatgaaactgggtcccaggaacggaaataaaaaccagcaaattaacacccatggatctacgacttataccgtatgaagttcttagtgaggagtagggcctagactgggtatgttggcgccgccacatgctggccgatactactgtacctcggaccaacatttagcatttgggctaaggaatgcaagccatagccaaaggtcacggtttggataaagatgaaatgtatttctgaacgcacataaaatataggaataagttggcgccaagagcagtccgagtcttactattttgaatgttcggcgcaatgaacactttgatgccctaaactcggtctaatgaactcgtgatatgcgggatacctgccagactgagtcagagcgccaatacatgcatatctgagctaataatgagaaaggaaaccatgggttgtattgtgtctgtcactaagagagagagaagaaggaagatcaaacaaggtggggagcaagtcctattaacctaaaagcagaaacagtctcaacaactaattatagcaccatacggactgcaagctttcgagtctcttcagctgatggaggattcagccgtggtcaagggatgtagggtgcaaccgggagtattctatggcgccatatgcggctgtcaacaacagctccgagtaggtagtctgtgcggttaaggagaggaagggtcacgatcacctatacaagcaagtgttgttgggttaagatgagtccggacctaggttagaagaatgttacgctggaatttaatatggatatttccgtgaggcatatcacaatcgaatcatgagatgcatcggaccggtagttatattatgtaaagtcctcaggccgagatgtcagatccagactcctccgcaaggtcatccataatagcgtcaaggtccatttcatgatcaatatcggcccagtcgtcaaagaatacatcttcctctccatattcgttctcctcccacggaagtgccagtggtttgctcggatggtagaacatgcgatggtagaagggcagacattcgcaagaacacacgtcgtatttgggcatatcaagaggataaggaacggagaccattgacatctccacgtttagttccgcgaacttgcttttccaggtgttgccctcctgacatatctcggtgacgggggggttgaatttggattcattgattgatgggagatgctctatgatttccggtacctcgcaggtaaagcgacgcagctttggaagttttccgtccttcaccatctcgtaaataaccgacgggagccaggccttcacttcatcgtatcttatcgtaagactttcgaggtttggcggtagaatatcatctaatggatccagttctatgcattccctccctgcaagtgtggcgagggttgttgtgagatgcttgaggtggactagttcaccgaagtctgtctcctcatcacctccccagtaaagatcgtaatctatgtattccagggaactgtcgtgtatgagggccgattgaatgtaacaatacggttctccgtcggggtctatcaattcatgtgatctaggtcctctgaaagtaaatcgcttcaaggctgttaggtattccagtgctgtttggaggtcaaacgggtttataacgcagttcagcagagtcagttcctctaggggcgatgtagatgatgctggaggtgcaaggtcggcttgggacaattggaaagtagcgccagtgatacagagctttcgtaaacctggatgacagaaaagtgcttcattgaaaatcggtaaacatctgccgttcatcttgggattgtgctcattatgatcatagtcgcttccgatgtgacctggtaacattagattttttttattcagtagagatagtcaattacaagactcacaaacacgcaaagcgggcagccccgatggggtttgaagagaagcgtgccagaacaaggtttcagtcgctcgctcgtaagtaatctcgtgatctggaggactgaacgacgattcttctgaaggcccataccccaactctcgatactctttcacgcttcctgatccagaggcaatctttttcacccattgtaacagcgcgtcatctctggcatgggtactggcccaccgagtagaatcaaagggcctgggattccttctcaaactcaagttctctagattcggcaaagtcacagccatcttgtagaacttgagatgacggtaggaccagacttctgacccagcatcctgcttgtgtcgaatctgacgaatgagtggtgctaactctggacgcttctctatcgtgagagcaagacgagcaccactttcagaattgaacaggcgtacgcatttgtagagctgagggtcaattctggaataaagtgcggggcatgtttgagcaagtcggctcagatgttgggcggattcttcatcttgtaggtattcaatgatgatatcccacagctccagaggaaagacgggtagtaatgtagatctctgggcgaacgttcgttccgttggagtggccattgaggatgaatcaataggactaatgatatattgaattccgtacacacttcggaagatgatgagaaagatgtggagtccacgggtgatgggttttctactcttttttggcgggacccagcttcttatctaagccccgccttctgacctgtacgcttgacgcgttttcgcgtttcctgtcctgttttcttgaaaacagatctgaagatatacaagattagaaatataaaaaggaagctattaatacgaggaagccaagccgatattcaatgctattcttatgcgatacaaacgaaattcaaaaaattcaaaaattcaaagctctccccccttataaaagaacatagtaatatacaacaaatgcaaactctcatgatggcataaattccgggtgacatagccccatcaaagaaaataaatctattcatcaacgcgaagaatcaaatcatcgcccctcctcgacggcgtcaaattccgactgttcggagaaacccgtttcgacacagcgccggccttccttttcggactatcaggataatgcacatctccaggatgcatatctgaaggatacggcagttccccagacggttctcgggacttcggcggcgcgaggccgcgtccacgctccagccataagtcatctgggcagtatggcgcgacgacttcgctgggtggtcgtggactgttgcggatctggacgcgtttgatatcgtttccacgtacgatccgcggcctggatactatctctgagcctggagggagggttgatgatgatagggtggggcaggattgaggcgcatgtcgtcctggtgacaagctgcgattctggggttgagcttgcgtggtcttgacgggagcggcagggagaatgtttgggtttgagcaagagtatgaggtttgtgaaacttgatagggtgtagcgctactgtctgttgacgaggttttgtaagctgggttggcgttggaagggattgctaaagctttcggggacccggatcttcgtttgaaattgtctgttgagaatccctctttgaatgcacgcggattggctggcagtcctgcgagttttggttggatacctggcctagggggcttgttttgcgtcatttctgctgtcgctgccgccgctgcttgttgactttcgtcctcttcaaatagagtctccccactaggtggccgatgactccacttcagcggcttcgggtatagtccagctataggatctgggagtagtcgtgctatgctgtgctgtgacgattgtgtccgaggcgaagtttcccagtccgagtcagagctgatggcaaaccctattcgttcttggtctgtgggctctttgctctggcccaagtggtgtaccttggcatattgcggtgagtatcgtggtggttgaacgcttgccattgaatggaaagtacgtggccgctgttccattgtctcgcggtcactcgttgggctgtatgaagactctaaacccaagccgttcgttgggagccgtggcatgggttttgaaaagtctggaggctcagacatggcgcctccgatctcgaaaatgtgtggtgctgtctgttcccgctgttttcgtcgccatctcttgcagcagaaaaatacagcaacaccgatgatgaaaaaccctgccacgcctgatgctactgacattccaatgatcgccgctggagtgataccatggtcacctttcttattcgtatcttcagaagagtcactggaaatttgtccggtagaggatgttggttcaacttgagaccctgaagatgaagaagcagcatagaatgtgatttcagacgtttgactagtagttgacgtcggtgtcgatgttgatgttgctatagatgtacccatagaggcctcggaggtgtgttcagttgtcgaagtagaaatagttggtgttgtctctctactagtttttgcatcactcgtcttcgtcgtacttgtatcagaaaataccgtcgcggtaatcgtctggtgtgttttcggaagagcttcagataccgagtcgcatatgtgataagcctttgactttgcgatgactgtctgtgagcatacagacagaacacagctcaaagccgcttcccccaatgtcaagctactggttgtcttggtacgacacagacacttgatattagacggtgacgtgcattcaatgaaggtgtattcggacatgatgaagctatcgacgcaattcttcgcacagtccgggaccatgtcatatagagctgagtttgctgcatcgctggaggcattttcggcggcagagcagagtgtggataagaggaggatcgcgatgagtatcctgtggataggaaggaggagcatgctgtggtagccctatacatgtttatcatgagcgacgatctgtcatgtacatttctcccatcaactgaccttggaaattcctacatgggaacgattacccgtgaaagcttgtacatgcggttaccatagttggtagatgtgtctgcgaattgagtagcatatgtgaaggtagtgaaattccagaaagagggactccaatctagttaaacaccaagtcagagcgcgacatcatcagaggcgcgaggcaaaactttccatgacgcccatcgactgttgcgtccaagtatctgcatttcgacatcattctgaaacacagtgcttgaggctgtgtatgtataggcgctagagtgaaaccgcataagattcgagatggtaagacccgcccacccacatccccacttcaggagacgaatcgttgtaatggtatagcgccctatcaggatggtgggcctagtaggcgtctccgatacgcgccgggccatcgaaagcgcttagactgcagaacgaggggtggatggcgccggactcggtttcagatttctcaaacttggtggacgagtaactggattgttgttttgggcaatccaaccctgtaacgctgtacagggtcagagtacatacagcgttacggcgttgtggttagtttcgcttgagttgtaggccctcgccggacaatatgttatctgaggatttctggaacagattcggaagctcgcggtgacccgagccctttttcctgtcgggttacacgtggctgagattcacaaggctcattatgttaggatcatattttgtttggtctgcctttttaccagttacgatggattactccgtatattgcatgtccgtacttaaccgcctaatctacaggcgctccctacacacagagaactcaggaggtttatagtaaaagcccattcccatgaataatgaaaactagccaacgggcattgatacgaaataacgcaaagtcagaccgtatgagctggtatcattcataacgaaaaagcaaaaaaaaaaacccgcagtatggagcaagacaaaagaaaagaagcaaaataaaagcataaccatgcgaccacacaaaatattagggaattatgaacatcatgccggactcgcgtcggacccgatgccaagtggtggaggctgcattaggctagtctcaaccggacctccacggaatcacgctgacaccgacgcccagaatatcgaatcgcaccgacccctactctcaaagcgcaaggcaaaagcaagggcttatgtgaaattgatcgcagtgcattcgcgttttcaagggacattaatcttggagagcgttggttgcgaggttgtgtgggaggtgggtatctctagtatttgaagataatgtagctataatatggtcagcggctgtcacaagatgctggcgcctcaaataaacacatacatggcgtggatgacaccggggatccatcccagaatggtcaataggatgttgatcaggaaatcagcaccacatccgcgctccaggaagacacccagaggaggcaggataatggcaaagatgatcttgcaaatgtcactattggcagtattagtatactgagcataatcctactcacaggcgacagtgcgacctgaacagcgcgacctgggagggctgggagtgagggtaacaggagtgacagggtgacagggtgacagggtgacagggtgaaggctaggacttgagtagaagccacagcccatgacatagagaatggacaacttacgaagcggtgaaaggcattttgggcagatttgatggaggttttgaaatgttaacgggagaaatgggaagggaagtggagggagggaagtcttaaaaggggaggacaaggctgagagcttgggtcaattacatcatgggccgccaccttggtgtggctcgtagaagagaaaaaaaccaccaaaaccaaggaaaaacagactgcaaatgtggcttaggctatgccctgatttggcttttgacttttcttgacattttaattttaacttgtttatcactacttcgtactctgtgcgacctacggagtacaattattacattgtccagggttgccaagatactgatcatctgtgctggcggctgtcaatgtcattccccctaatgttcctcacctatcccgttcattcttttgctcgctgcctaaaagaaacttggcactagggattcacctgcacttcaatttcgaatttgtcgatcgtctgtgttctaagatttgactgtatatgttgtacagtacggggttccttgttacctgcatgtacggagtacatccaacatatgcgcccatgctgcagtttaagtttcataatggtgacgatctctacaaacaccgtcatttctaattttggcgtgaatctttacttggttaggcctgccaagtacttgccggactttgtacggtttgtagtgccaagtccccctagatcgtggttagacaggccagacagctcagccctatgatgggcccttgcccccccacctgccagggcacctggtttatgtggttggcgtttatgacatcctcgaaattaaaaagtggctggggagcattgtcagtgacacagcaacaagataagcattgaggcagtgaagggaccatgggtcacgcgtgataccgagttctaaagaggaaattaccagactgatcaaagtcgggtttacatatcgtttttcagccaacatcaactgcgtctaacaaggagttccattgcggtatgtatgtagatctggcgcaacagcaacaaactccgaccaaagctgttaactagtatgtaccagcctccttacccaatgtcagtggtcaagtccccattggcagcgagtctactccgtagtgtttcgcgagtagctacgtggttctttacttctgcaagagacccgccctgcggaccggggccccctgcggacttagatgttcagggccactgcttttgtggtgtccacagcagcatctgcatgttcttctgaaccccgtggattagtggtctagattccacttcttgctccacacgacaaggacagtcgattctactggtgcattattataaccaaacagcgcatgaatacggagtacatactccgtaactgcctcttcaatattcgcaatttacctaaagcttggaagcatacggagtaattataaggtgaataggggctactgtgtgcttttgggtagtcttttatcgatatcattctggttattccgctatcccttttatagctagaaatatgaaaatttgggtaaaatgaagaaaatatccagatgactctgcaacatatagagtacccagggaatatatatcgatggacggcggaggctcttacttgaatgaggctagcgtgccatattgagttgttcactcacaaccttcgcgctgtatcacaaccttgaacaactcaatctaaagctggtgtcaagtatgttgcgtgatagtatcgtacattgtgcatgatctctcctgagtacggtgaaaacagatgttccgctccgcgactgacccactatcctccgcaatgacttccgcattttcctgattggatcagctttaatcttgatatctcaatgtcaatgagattcaaacagatgagggtagccttcacttccggacgctggcagcttctgggatcatgcaaagcccctaaaagcctcggtcgcgcaaatagatggtatgcgacacagaatttggccaaaggtggccggccctttgcgtacacatggctcacaaagacagcagaacagacagtgagcaaaaccaacccccttacacctttggaatccaagctaaatagtccaagaccccagatgatattttatccagtcttccttcagggcctgtgagcccatcagccgcgcccgcttctgtccctctcctcctcgtcaccccaagcttcgcccactggcttgattcttctagtcctttcttgtcgcaatttctcggtcgcctttacggcaactccccagggaacgatactctctatgccgttacagccgtggttgacgcaatcccgaatactacatccgaaagccgcaatttaagtgagtctgaagggctgtcgcttctgatagtagggcaatcaggcgtccaggcaaaggctgcaccaccccgtctcatcagaagctctgccagcgaggaaaccaatctcttgttttcattccaaaccgatgtgattggtcaaaccagcaagggacctgcgcatgagattgggttgcgcctagcgaacactatatttgtcaatgggagggaaaccacaatttttggtacacgttggctttgggataaaacctcaaacagatatgctttggacaattcggtcgatttcacaagctgcatgcttacagccacttcccaggctgtagattctgcattggagttgccactgtacccagtgactggacggcgaagagtcatgactagcatgggaaacattttacggcaactagcaaaatcgatggatctgacatcgacggacacaattcctgcttcgtccgagctcgagaaggagcttccgcgttatatcgcagaacataatatcgttgaccagcgtgtatccgtatgggcacttgtcgagaaacctgactcggaggtggctggttcaggcttatctacccatgatcgcttgatccaatctcttcaccgaggtgggaaattgcaccgtgtcatgagcggtggaggtggatggggaaagaagcagggccttctttcgctagatcccgaagtcagcttctctgggactgccaaccgagacgatcttgtcgcattgactcaagttttggatcctgatatcgcacagttggacacacttccttctattgataaggggattactgtagatgatctatctctactttcacaggttgctactgcaggtgattatattcagttctttgtgtcagtagaaccaactgggtcgcagatcaaagttccgagcaatcatgatttgcaggaagagcctatcagctatcactttggaatggtagctgactccatgaaacttgaaacacaccaaacggatgaggaaaacaatgggatcatttctttgcctcacacctttggcgcattgtccgagaaggcaatcgcctactcgcagcccatcaagggagaaacacggtcggagtcgtgcacgaagctggatattccaggatctcgagttgtcctcgagactgtataaacagcatgatacatgtacaataatgcatacataaccaactgaaaaaacctaccccagctgaatctagtcatacatgtcacatatgctgtagtcattacctgtccggtggatatgccaagacagtacacgtgacccagagaggccagcatgtttgccgtcgacctccaagcctctggactctttccatcctctccgaccgcatccaactgagctcgccgacctcgggtgtttttatttctttttaaaggtctaactatcccacgaaacctcgttgagtcgtctttgatcaaaatggcaactgaactttggtaagtcgtcagctagacctccctccagcccctgggtgctcaacagcttccgatcaacaccctgttatcaagcccgtcatcccccataatttatggatcagccttgctaacatttagattgacagccccgtctatgcggtgagtcttgttaaatgctagatctcgacacccgagcacaaccaagccaatcgcccgtgtctcggccctccgcgtcatccatctgctcacaatgcatccgaatgataactaatctttcttcctttagcccttttttggcgcgctgggctgcacctccgctatcgtcttcacctgcttcggtgccgcatatggaactgctaaggctggtgtcggagtttgctccatggccgtcctccgccccgacctgatcgtcaagagtacgtggatctcaacaagagctctgccgatctggcaatgagatactcctagtctcgcgcaaggatatatggcagcaattcgctaactattctccagacattgtccccattgtcatggcgggtatcattggtatctacggtcttgtcgtatcggtcctggtcgccaacgacttgacccagcagcttcctctctacactggtttcatccagctcggtgctggtctgtctgtcggtctggctggtcttgctgcggggtaagtttcctacacagcgaatcgcctattgttctaagtttgttgctaattgggattacagtttcgctattggtattgttggtgacgcgggtgttcgtggaacggctcaacagcctagactgtatgtcggaatgattctgattctcattttcgctgaagtcttgggtaagtcgtagctattcctcatacctctgtataattgcatctaaccatccctcacaggtctgtacgggttgattgttgctcttctcatgaactcgcgctcgaaagcaacctgctaaacgaaagacctcccgcagcattccgggaatgtaacgtcgaatcgcctcatggtccgcgcgcgattcctggttcattcccggatgtgcattctcaacatttccccgacgcaaaccaatgtgccctcttcggtcggggaagctgacatgataaacttggtgcgggggcaggatcggatgatatcggaaaatgttaacgatttcagcccatttgaaagtgaagattcggtgattgagtggatgtagaaccgggaaatctgttcaagaattcgtctgggactcggtggacaggtgtgggtagatattggattttttttggctttacgttgcatgacaccgcgctggactttgtactttatatgaaattcgctgatcggggacttacgtctccgtcctctcttccattatggtggtttggcaggatcttctgtaaggaatttcttgtttctttcttgtcctctgccctccctgtcgacatatgtttcttctatctcagggttgcttaattcttttgagtgatttgggcttggtagtagtagtgtgcattcagcccttacctaggtacggtgttgtgactcatagaccttggatgtaactacgtatagatcttcttaggcgtcggaatattgtgagtgagtttgtaagatatcatatttactgagataaaacaataccaaatcagccaaagtagtagcgccataacagaagccgagtaattaagatctatttgcttatccgaatgcatgggagagtcaatgcccacatcacacagcagccaaagaccgcaatcacttctgcgcaagttcagcagttcgcagctaaaacaccaagagagaagaagtatttgtgtatttgtggatatttgatcgagtatagggcgagagagaatagataagggagaatggaaaaggaataaaaaaaaatgtatgaaagcgaggatatatgccctgaactctcacaagacttgcctcgacccaaaatgcacagacgcaggcaagatgcaactgatagcaaaaagaacaaaagtaaaccaggaaacttcaagcacaagtctacttgtcgagtttccgtcttagagtacgcgttctcttcatcagcttcttgaacttgtgcttcttcatcttagccttgcgccgtctcatggtgctgatagcatgcatggtgcggttgttgcgcagccgttccatatatgtcatacccgcagcggaatcagagggagcctcgatagagatctcgtcgcgcatatcagatgggtcttccatctctccgctgcgaacgaaaggtcccgtgtgtgcctcataggtcttgcggccgtcggcatgacgagcctcgcgaatagtcaggacggtcgagtaggtttgatactcattgtcgacctgggcatcgatggtctcggcagtctcggcaatctcggcagcggatgtgttcatggcgacgggcgggggaggaggctggaatgggcggagacgacgggtgaattcctccacagacatctttgagtcgggaccatcaagcatgcggagttcgccgtcctgttcgctgaagctccgaaactggtcttcagactctgacatgccttgagaaccagtttccatcgactgcacggccgatgaaagagtgaagatgacgtcttccggttcattcttcagcggacgctttgacgagaagatcgcttcgaaggcatcggtgctcgaggtggggggcacagtggtcgtcaccgagattggccggtggatggagaagaacgacgctatatgaacatctagcagcgaacaaaaagaaaagtcagcttctagtcatctatttgcgagacaaaaccatacacggggcttgctggggtttgagtactaaccatgtggctgtcggtgctgtgtcgatggaacacttgggaggttggaaaatgccgtatgttgactagactttgaagatccgtttcgggtagagctgtccttcccccgacggcggttagccttgctcttctcgctagatgagttgactccttttgccggggcagaggtgtccattcgtcgggagccatcgctgggcgggacgggcggtttggaggatgaggaggaataccggcgttggtgcagaggtcgggttgcgccgagcaagctgctggtaagattttgaccggagcgagttataccggaaagcggcatgggagtccatgcnnnnnnnnnnnnnnnnnnnnnnnnnnnnnnnnnnnnnnnnnnnnnnnnnnnnnnnnnnnnnnnnnnnnnnnnnnnnnnnnnnnnnnnnnnnnnnnnnnnnnnnnnnnnnnnnnnnnnnnnnnnnnnnnnnnnnnnnnnnnnnnnnnnnnnnnnnnnaagggggcggggcccccccgcccgcccggcgtaaggatgttgacaacatggttggtagataacccagtcactactgagagggtgaatgagtctgaatcggaggcgaaatcagtcggcccggaactcggggtcactgatcatgcggatgtttatgtaatattgatgcctaaggcgtgacaagttatagaccacgcaattgtggttccacttgatgggggaaaaccccttcttttatacatattgaccgtattgtttcttcgggctatttcaaacggccggatgatttgatagctaaacttaatctctcaaggtacatcaaggctagagtccgaaaagtgaaaaaagtgcccataaaagagcaggatgtcgagttcattcagagataagatatagtaaataaagacccagaatgattgtgataatacagagcagtcgttagtaaacacagctgcaaagacaaacaaatggtatcactatgcattaaaccaaaaaatggaggaaaatggggatggcaacgacacagtcgctaaccgaaacgtgggcattagttggcgaaatcggataggcttttggatgcaacgtgatagacccaatgatgtgagcagagagcagataacaacctctcggtacgcctcgttaaaaaataaatcaagaatgaaaaaaaaaaaagaaaatacggcaatgatcacgaaggagtgaacgaattgtagccgccctggaatgcaaccggaaaataactggtaggctgaagagcttgagaaataggaaatgaagtccaagaaaaaaaaaagaaagagaaaaatcattgtcagacagggtcatggggaatgcctcgggaatttgagggcctctgccttatagtattaaggtatgcagattcttctgaatgatcatgtcctgtactgaatccatagtcgccttgagtaatgttgtatcagttgcgttagtgtaatggatgtagatttcgcggtctgggatgcggttgataccgcggaatcggtctgcaaagtactgtgccgaggaatcatagtcggtgtccgagccggtataatctgggaagtgtttggagatagaggagatggtgagctttcctttgaagagatcaatcttgttgaggaacagaatgattggtttgcgcttgaaccattcgccgttgactaatgattcgaataacatcatggcctcgtgcatttgattctgtaagatgtgattagcggtgctggcgagagaattgggaaaatcatgcttacagcattctggtcttcgactagacattggtcatatccagataaggcgaccatgaacaatagacactggacaccctcgaagcaatgaatccatttcttccgctctgaccgctgtcctccaacatccatcatgcggaagttcatctgcccgagctcaaacaaagtttccgtaatacctgtcgtccgaagtcgagcctgcaacatgtcctgattatcaggaagccagcccggagcgaatatgcgatcgagagatccatagaaactgaatttcatcagtccaagcccatgtaatatatcaccaactcaacttactagtgcaagttgtcatggagagcaaattcatgccctcgtgcaacagcgttctgcacaccttcatccttccacatggccctcatcgcatcgcgaacctcgagattggagaaggcttcgttggatcctacatctgggtccgtattgtctaataggtcggcaaatggctttcaaccctcgttagctgatgtcgggctcttgagaaaaaggctggttagtaccttggtcttttcctcgttctcaaaatcaatatcctcggcattcatgatatccaacaagaccttgaacgcaatgacgatgttcgagtagattacggcacgggtttgatgacgctcttcctcggggaagccccggctgtgaatgattcgcatctgcttgattatggtggacttgccggactctcccgctcctgaatattctattagtaactcgatcctgaagcaatccgacaatcagcgaccgagaatcacccacctaatagcagaatcttgatggtccggtccagcgtcttcttgtcattcttgatggtccggtcaatgcgcgcattgcgctggaaagcatccttatcaacctcctcgggctttgaaaccaagcaacccatggtttatgtccggtaacggcaaactacctagcgcgatggtggttagcaacggtttattacaagctgaactagtttgacaaggcactcgacggatcaacgcgttttcaatccgagtcagggatgcgattggattgcgccacacgggagtccggtcgaagctcagagacaaaagactcgactagactccaccagactcgacaggtgactagactctctccgcgcaaggtgatagatgtgcataccttgaaaaagaacaaaatcctcctctctattatgcctaagtccaactccgacccaacgtcgaatgactggcgtgcaacgtgataggcagaagcttgaaaggttcgatgggtgcttccgttattccccacacgtatcgaccacgttccgttgcgaattgagcggtcgtgttttcaattggactaggttatcctccgagacaggcgccaaacgtgagcgacacaacgtcagcctgccgaaggccgaataggaagcttgaaggggaaggacgttggcggtgacgggggggggagccgagatcgcgttccaaagttcaaaatatggacatttcccgagttctgaggacaaaaggacgtttcggaggctgagagccgagttctccggaggggagagggggcgagaaatggaagaaatggaatggcgcattcaggtcgtacgtctctcccgtcccacgagcgagtccacaagcggggaggaggtgatcacctgtcagatattctggtattttgtatactgatttcggtatctttgacttgagcttttgtcaatgttcggtatttggagtatttggagtattctcaggtattttcgcgtgttcttcaggaaaatacgtatgtcctcgttatcatttccgttaatttcttttcccttgacgatctcctctttgtattggaaatactacaaaggctttacttttacggactccatccaaatcttcactcccagggggccgctaaaccgatccactatggggtgggcgcttgaccccctgtctgcagcatctacgagttgcggacctatcaattgtaaacagatactgcagctcggttgttctattgttcgattgccttttaccgacactatatcttttacagtctgacaggagacatagagggatgaggaaaacttagggatccatcaaatggaactattggaaccgcttcgggtactccgtccacacccacacgttgatccaatcagcagaaattctgtgacaatcgaattgtttttcaattttccttattttgtcttacttttgcaaatctccttccttaaagaaaagaagaaatcggcatggaaatatgtacaacacccgatgtacgcaatatcaaaggaataatgtacgaagtacagagtactccgtacgaaatggtgcattcgccaagccaattcggaatgcaaagctccagcgatcgacacgaagctgctgaaacccgcatggatgtgccactggccaatgcaagggccatcctgaaacgttggcggattcctgtcccgggtttaacactaagggtatgcttggatcactatgggcatttgctcttcttcttctttacttccaaccgagatgttgagttcgtctactggagcctatgaaattcggattccccaagagaaccgtatgaatacatctacgaccacagttctaccgaggttctgacggaaataaggctagcaccggagtacagcgcttaaggggttccgcacaaaccaatcagagagtagagttcaaacccaacattcgacattctgaagggctccatcaagagaaacagatgttcggtacgaagtattccgtgggtggaccgtgactatcgtttctcttcgcccccaagcacacaatttctgccgtgcttgagccgcagatgttgtatagagtatcttgaatttgactgtgacgaggattgcgagatgaccaactgtgctcaacgattcatttctgcatatatgcaaccccgcaatactcagtactccaggcccgtcaagaggggggacaaagactgattgccccgttctaccggcagttggcagtccccattttcaagatatgattctcattaattgcgggcaatatcaccacaccatcgtgctagtaaggcaggggtgatccttctgggactggtcaaattcacctgtggggatcgattaggctcctaaaagccatgtcacatttagccggaatcctaagaatagaccatacaacgttcaagtttgtatgggatgatccggatcaacctggaccaacctagttcgcatcaccgaacaaaaattctccttgactcgacatggtataggaatcgccatgccggagatgcgatcgagattatactttaggagtatgaaatatgtactccgtacataagtacggagtacccggagggtcgatctaggttgccccagctgcttactagttgctactactagctgcttactgatgtaaaagagcagcccacgggtctcatgctcaaagcctgagattgggttattccccacatgcaactttcgaggaatttcccacgtgtggcatgtctttttctctggcaggtttttatattatccaatcccctggcattctatttctgttgtatgcataatgggtgttccgctggtatcaagaagtttcaaataaaatcgggagctcacaacacaaatacctcacacagtacggagtatattgtatgtatatgtgttccgtactccgtacatacctaacagatccctcttaagaaacgggtacctaccatcttgctagggattttgacactaaggcggtgtgaagggcggtaattcgaagcctggcaaatggtcgaattagaaatcggaatccccttaattaattcccttcccggagatagtcaatagggtttagaactttaggttcgtcaaagctagacgccacacataaataaatctatctatgaaactatacagtactactccgtacgcatgtcaggaactctgtggccggtatcaaggttaacggtaaacctaccaacggccaaactagtactcaggggcgttgaatgactcgagcaatttaaacgttgtcgatcggcatttgactggtccaatctcttggttttcaacgtccgagcgtgagtcgttcgggaatagctccggagctgatatacctagtccagcatagcactcgtttagatagcgagacctcattgggtttctttttcgagtgtaatataactgcttcgcttcgctccgcaatgagaataatttactcctcttctacggagtatatatatattcatccttatctctccgacgcacccgtcctttatataaacgttagctatcgcttcatacaagtctaactagaagacaacgtagaaacttgaccgagtctaattcctaacccagggtagggttttcatcctagaggctaagtcaattattataaacctactcatctagttattatcggccttagatacgcccttagttttagactacccctcttaaacctctatacatcgggaggactttaagactcacaaaagaaagacataagtatcgctcatcgtggcaaacggcccaagtcattcaatattggcttctgattttccgttccttgcagttcaacttgaacgggtcttcacctggcctcggtgatttcgtcattttaaactgtattgctgtgtgaactcaaaactgatagacaatttacggagatcaggctgctaatatcggtgcttccatctttcgttaggaggggatcagcgccatcgaaatctcgcagaagtttctcgataagttcagcacggccacggccacggcccactagcatggagaatgttaccgatagttgcagggacagctagaaaccccgggtttggatctctaagaaggggatccttattcaaaaggtgatgaaatttgccgtctggtagttatgtcatctgatgaactcacaggctggtagccctgtaaagtgatttagggatacttgacgttcgacaaaggtggagagttctgatatgacggatggacttaagtttcgcaggtccgacaatgtagtttgtacaagtcaaacaaataacagaagagaaaattttgaacttggatggaaaggtattttggacctttgttcgggaacgagaccacgggggaaggaagttataggcttcaagtggagaagagagaagtagtagagtggggcaaagaaagtggggctagccgtcctagtcatgtgacaattcgtgaagaagcgaagatacggcacaactccgtatattgtggtttattttatttttttggttgactagtccccatgctaagagatggggaatactccgtaccgatacttgtctgtcgatccttttctataaggggatgaaattaactgatagcgtggcaggtttccactaaatagaattcttgcacggagtactagattctccgtagttagtagttactccgtaactagttaatcaattaaataataatgattagcaaattttcacttcgataggaatcccgaggtccactggtactcttcgccagtgcccagagtgcagattgaacaacagatgtgaagcctttgtggatgcctcggagacaaattgttggtgacgtcactgaataattacagaaagagaccacatctcacagaaccgagtcttatattctctatactcttcaggtctacaatggaccacataaagaaaagagcgctagtggttgtcttccccatgttcaacatccttgatgtgagcggtccagtttcagtactcttcaacaccacggacttctccgtgagctatgccgcgaaggatgagctcacaacgtctcaagagaacacaacaattaagagagacatatccctcgctgaagccaaacttcatctgtccgactatgacatattgatcgtccctggttcacgaccaaacaatatcctaccgcttgtggaaaccgatcaggggccgttatcggaacttgtcgaatttatcacctgttttgcatccgacatggaccaagatagcatgcggcaacgtactattctggccgtctgcatgggatcctacttcctagcctttgcaggtgtccttgatggcctcacggcaaccactcaccgtcttgctgtccccgggctccgagacgtaacccaacgttatgtggatcgaacccctgctgcgaaagggactcgagtcgtccccgaagatccctcagatctggtttcctacctggatgctggccagaatcaggccggagtcagaatcatcacgacgggcgctatggccaatggcatcgatgccacattgcattttgttggcctttgttcgggtcggtcacttgcgattgaggtggcggagctcattggatatcggtggaaggaaatctaggtgtgaagctagtggtacaaggaaagccatggggcagggttgtcttggcagacctggctgttttcatacattcgcaagcagtgcggaatacgaaatcaccgcatagagtctaaggtctggtgttatatgcctgtttgacgcaaacaaccacgagcgcttctcttgattgcacgatttgcccttatcaatatgtcatactcaaagaccatgccctcaatttgcccatttgtctacctggcctttttgtttgttttctaaaagcgaaagtccataatcggagttaagcatatgctagcaattgtaatattcaatgtcacccatatgcctgtagtataatgcggaccttcatcagacttaaacgtaacacgaatgatgggacgcccctaaggcctccaccaatcagataggttgtagatgcgactccacgcttcgagtgggaagtacatattgcttggaatgtaatcacaccggaaatacagaactgcaggccttgagtcaggttaaaatgctttaatctattgcccctctccccaaagagaagactatatcccagtaggtgttccaatttctagaaccttgacaagttgctataattcgaggaacacgcggtaaagctatagtacagacagagtaagctccccacatttacccctcacgttgactgcagctatcaagaggtctctcaaaatttcccgttacctcttgtttgcaatggcaaataccatattatcaatagctgaccttgaggaggcggcttccaactctctacccgtctctgcgagaggtatttattggttccccttgttgttatctccgatatctatctttaacacagataaacagacttcttcaactccggtgcaacgaacgaagtcacactccacgaaaattatgctgcgtataggaagtaccgtctcttaccaagagttctgagaaatgtgtcacttgtcgacactggaatctccctctttgaccgagatatcacatttccgctttgtgtctcacccaccggaatccaggctatggctcacccagaaggagagctggccacaagccgagcctgtgccaaaatgggcgtcaacatgggtatctcctcttatgccaatcactcggttgaagagatcaccgtcgctggaaaagaagtagggtcaattcatcatgtgatgcagctttacgcgatgaacgacaaagccaaacaagaacgaatcatccgtcgggctgaggctgcggggtgcaaggctttatttctgacagcggatagtcccgtactcggggtgcgctggaatgaatggcggaatggatttatgcctccagttggcttagggtatccgatgtatgaaagaacatctgccgagattcagcagcaatctcacgatgatgggtttagctcgacaaactcggattcccattcctgggccacggagataccgtggttgcgcagcgtcacgaagatggagatttggattaagggcattctcactccggaagatgtcgagactgctattgaatatggctgcgagggtatcataattagcaaccatggcggtcgtcagttggacgagacaccggccacaattgatgcgcttcctgcctgtgctaaagttgcacgaggacggatcaagatccatattgatggtggaattcgatctggggtggacattttcaaagccttggctcttggtgctgaatgctgctgggttggtcgtcctgcactttggggacttgcggtaagtgctccttgtttattcaagaatcctgataggcggttatacttacttttttggtagtataacggtcaacagggagtcgagctgatgctcaggatcctgttcgatgacttcaagcgatgcatgcagctcacaggctgtagatcgatatctgagatcagccccgcaagtttagcagttgtcaatgcatatgggcctttgtctagactgtgatcactgttgtgattacatctggtgcccaaagccttatttccatacatgcttagctgttgccactttttgatcccggtataataataaggttctaagcaaacggagccacctgcccagaattgggggccacttcgtggaccttgcccggttcctagtcccagaggtgaggcttgtagttgtcatggcttgcatatatttaatctgcatctccgtataaagcctaggcctaaaacaccactattagaaaaatactgttgatagaacttgactatgactctttggagggggcaaaggtgtgaaagtaaatgacgttcaccacctgattttcaaccacctgccttacaactagcatttcaaccaccaacgttgcaacctgctcttcggttcgtaaagttggtagttgaaatgcaggttgtaaaaaaggtggctgagacgtaggttgaccaggggcaatcgtgagtctagaaatcaattgtcgattgcccgataacccttaactctatcgaggaattgatctgcgctgattgataataatagcccattcccagggcttaggtgtggcttaacttattgtaagttgaaagtgtatcgtcccgaggtcatctgcgggggcaaaccgctgagtcatcattggtctcgggacagctggagccgctaagctagccccgagtgtgacgccattatcccgatcccagcttctcctcattgcctaaggagtagtaatatgcaccgagactcattcagtccatgatcctcgggtaagtatcatcttctcgaaacagtttatcatttttaagcaaggctccatcatcattcaggtatgtcttcatgtccggcagctatgaggaggtgctaatagctcctctgggaccatagcaaacgtgactccaacgacctcgttgcccaatatgcagtccgagaacggtccgcttctgggtgtgaacgaagtctacgactccgaggacaatgactttgtttccagccacaccctcgacaataagctacaaagaactcacccctgctgggcgagggccctgagaaaagggctctgcgtctttgtgatcaccggtcttattacctactatctaggcttatcgcatggtatgagccccctctcgctattataatgcgtcactaacatgatcgtccttatgactaggctctccgtctactgagaagaatccgtccccacactcggaagccccccagctttgccagtcacaagaatgcattcatgctgcttccgaaatcctctacaatttggatgccaactacgagaacatagacccctgcactgattttgaccaatatgtctgcggtggatggagagaacaccatgacatgcggcccgatcagggatcgatatttgcgggcacaatcatggaagagaatgcccagactaaacttcgccatatcttggagcgcacagaaccgccgcagtcttctgatgctgataatttcaagaaactcaaagctgcatacgatgcttgcttggacgagggtacagtcatcaaacgtggcagcaagcctttgactaatattctggatgaactgaaaactatctatcccgcaaaggcagagggtcttgtgaaaggatcacatgatcaactcaccagcgctttgttatatctggctaatgctggtgtcgaggctctggcttcttccggtgtcactgtaagtctatgcgacctatactttatgggcgccactaatgacccctttagcccgatgatcgagaccctgataatgttgttatcatgatctcaccgcctcgtgaaatcggacttccggcaagagagtactataataacacgaagaccgtggctgattacacgaccgttttgaagcaagttgttcggggacttgctggagatggattcgataaaattgcggaggatgttgtagcctttgaaaagaagctcgcggatgtgaccccggacacccaaacccaggaagatgtcaccaaatactacaacccccttagtatcaaggaaacggaggcgctggtacctgagatttcttttactgatattatttcatctttggcgccccgtgactacaaaactgatcgcctaattgttggatcgccttcctatatgaaggcgttgtccgttctcttgaaaaacacacccagagagactgttctgctcttcttgcagtggaagctcatccaagcctttgcggatgttatcgaggatgcctccattgaacctcttcggcgattcgagaatgaactcgctggcaaagagcctcaggctaaggaggagcgatggcgtaaatgccttgggcgtctggatgaagggcttgaatggagtctcagccgtttctatgtgcttgatgcgttctctgaggactcgaaaaagcttggcgatcagatcgtttccgatatcaaggagcgatttatcttcacactggaccagactagctggatgtccccagatgtgcgaagattgggcattgagaaggttggaaacatcatccagaagatcggatatcctacaaagagtcccaatgttttagaccctgaggatgtgaataaattctatcgggagctggaattgtccaaggacacattctttgagaatgaggtggctgtggcgaagtttcaacttcgcggcgaatggtctaagctcggaaagcccaccaaccgcgacgaatgggatatgagtgcaccgactgttaacgcttattacaacccgccaggtaatgagatcgttttccctgccggcattatgcagccgccagcgttctatggaccttcggctccgctgtatctggcatatggtgcatttggtgctgtgagcggccacgaactttcacatggtatgttcagttgtctgcaaacctactgccattttcccactgaccaacgtgatatagctttcgattctaccggtcgacactacgacgagagtggaaattacaccaactggtgggacgacaagacagttgaagcatttgaagagcgtgctcaatgctttgtcgaccagtattccaagtttacagtcattggtcccgagggcaaggtcctccacgtgaatggacgactgacactgggcgagaacatcgccgacgctggaggattggcagcatcataccatgcgtggaagaagcacgatgaggcaaagcctgatctccacctcccgggattggatgcatttaccaaagagcagctgttctttatatcttatggcaattggtggtgtggaaagactactcaggaggcggctgagcgggcggtctataacgacccccatgcgcccaaatcggcacgaattatcgtgagtttcgtcgatgcattcctttctttgtgttctatcactgaccgctgtcacaggaaactatggccaactctagggagttcaagaatgcctttagttgcccagacaggaagccagcttgcaagctctggtagttttgagtagtgcacttctgtcaatggcattcacttttatgagtttttaatcaattcgaggattctgacttcgtcacgactgaagtatctagctgcgcatcccatttcatccttgcccggtacttgaatggatattgatgtagctcgctcgtttttctcaacctttcaattttttaccgctgggccggaagcgttgcaagctaaaattttaaacttttagcgagaccgaagtacttgacatatattactcatcatttaaatcagcaaagcaactcgttggcaccaacgatgtctgatacatcactgacccaatatatggatgctaacgatgtcggagaggaggacctcctgctcggccaagatgccgaagcccttaagctgctgatctccacagcgatcgctgcccgaaacaagtgggaataggcggaccaggcagaggaaaagaggttatgtagttagttacagagcacggaatgaagagtcggccagtggatttagttacctagatcagcaaggacctagccccctcacttcttcagatttagatgattctaggtcccgtttttttcccaatgtcgacatgtcaaatcttatggaccagtgtcagtttgatcgacagctgacatgtgatgtctcacccgtatgcttggaggccagatcgacattgagcactccgtatattgtgctccgtacagagtcgacgagataaaggatcatatgaagctaaccagaaatagtgataattacctgacctcctgaaattttaatcatacgatcgtgggacctcagatcctcggtcatgtgagagagtccggcattagcgctagatctattaagtagggcagccaatggtcccagttagggcgttgctgcacggtagttggtttgcaatgagagaggtcacacagcctgcaatcgtatagagacttagatgtactccgtccgaagtaaaacatctgaattgatcgacccagatccgggatatgtcagacagccggtagctccgtcaatttccagtttcgcgtcactccattacggacgattcaaccaaccagaacccctgcactgccaattttacctacgaagtgcggtactttggaggtggttttcgcttttcaccggccttccggaacgtagtgacctatcagctctggcgtgattcgtagaaagaaatgagggatgaatagtaagatattattcaagtacatgtatataccccgtactccgactcctccggaggaagagtcaggtatgtatagaaaataaagtaagtaaaaggggctggacagttctatggaagaacacgacccagcgttcccacttgtgttcttccgccgcgtcgggtcatctccacaaaaacaagagtcggatttcttccctttttttcctttctaaatttccttcgacctcataagtcatgtattactttgtatgattttgccctgaccgattccagtggtacaaaccctggccccgtcgccacgggagcattttgcgccgttctcatagctctcgcgccatggagccctttcctccacccgtcgacccgtcggagttcaaggatgcctttctgggcccgcaagtccaaatcaatgaactgccagcctcaaatcaaatgtctagtggagggccccagaatccaatcacgaatcttcgccgtgccaatactgtagctcagaccggcaatgtcaagcggaatctagagttgaaggcagctcgcgagagaacagcaactgggataagcgccaaggatagccatgagcctatacgacagaacaaattacaacggtctcaaacacatcgtggccccctagaggcgcgttcacctgggaggaaggccggccatttcaccgtaagaagtgtcggccaaaatggcaaaatatttctcaggtacaccaatcaatccataattcctcgtgctcggtcatatactgtgcagcctgctgatagtaggactatttcaataatttaggccgattgccaatccgccccagacaagcccacagcttgcatccttctctccggttgatacctcgaaatccagtccccttcagccgcagtgtcatgcacatacccgcgaggacgcaaatcctttcaggtggtcgagctcccaactatccgagttacgcccgcgccaacagcccgaagatcccgaccccgtcctcgctgtgtctcctcccgagctctcgaacctgcaccgcacgagaccggtctcattttcgacgatatcggaccagcaatcgatagccggtgctgggaagcgtggggagctgcggattgtcatcgatagatccgaagaccgccccaagtctgcaggtgagaattcgacaccagcattggaggttcctattccgcgttatcggcttgggtcgccgcgattcaacaccgaaggcagtgcaataatgcagagttctgtctacacgcgaacctcgatgtcggataactttccagattcgacactgcttgggggtagagccgaccctctactgggactccatagtccatatccccgagactctttctcgcggcatcggccgtcttttgccatttcgatgttctcaggaaccgcggcggctatggacatgaaccgagctgagccagtcccgaggaattctatggtctatgaactggaagagccggtggagccatccatttacgaaacgctggtctatgatatggatgatgggtcggttgtccgatacattcctgggaccaaggatatcagtgctgccacacctgcccgaatcgttgcacaaatctcctccgagtcattcatggactatgagctagtatcggacttcttccttacctttcgttcatacctatctacaacacaccttttggctcttctccttgcgcgcttaaagtgggcaatcaaccggctacaagatgatggacgcattattaggattcgcacatttgcggctttgcgacattggattctcaattactttgtcgatgactttgttacgaattacgagcttcggacccacttctgcgagaccattaacaagctatattcagaggtcagatctcgacaacatggcggcacgagtgatcgaaagattcttattgacctgaagcgttgctggaatggcaaatgttcggtttattggtcttcccccgacttgtctcgtgcctataacgacccagaaatatcaatcgtacctggagatgctcagattgagttgcctaaagttgaggaactgcagaaaaacgtccctattcatggaacgacgccccgtgcaaacaccacatttcgggaaagtcttgctttccccatacagcatgatcgaaatgattctgcagcaacttcacaaagcattccattctctgacaaaagcgaacagagcttgatggcactctcgtgttcattaccacctaaatctcccaggcgcttttccatgtctgcctcgaaaggcaaggcaccccgccctgtggtattgggtctcacaaagtccaagtctccgtctaggactcatgaaccacctaggtcacctgtatcttccatggtctcccggcacccatacaccagtcatagccataaaagaagcggaagcttctcagactcggtgcgagatggtcgactgccaatttttgcgatggagcctgaaacgggacccgcaccacaggagatgctcgatccggttagtttaatacgtggagagatgtaccctcctgcagagtcgtatatgacaatgatggcaccggagtcgccgcctcttcctccgccgttgaagaacctaaatcccgatcgtcggagtacaccgggtgtgcctaagtcgtcacctaactcgggtatgagaacaatcattggctcaatcaaacgagcgctgcacacgaggaacggtgggcagagcgtctctgctcgcattgcgaatgcccacgaggctatttcatcgccttcccgaggaaagacgtcggcgatgccaattggactggctttcggctctgaattctaccgggagagaaagatggctgccactcctaaatacccaggtcgaattgatctactatgtgacgaggtcctcaagcaataccgcttggccatgaaccaggaaggaacgaaagagaaaacccagccaccagctgcttctgactttcatcaagtgaccccacaggagcctgctgccaacacttctaatcttgtaccgacgcaaacccccaattccgactccaaactcaggagcggtatcaccatgggcagcgaatcaatcattatagttgatgataccggtttcgaaatgccctttatgtcaggggcagcacaggaaccaatgccaattgttaatgacaatacttgtgaaacgccggaactcgaaatgcccgataacgcctcaacgcaatcgatacccgtcgaaggagaacatctccggccggtctgctacaatgccgaaaaatcagtttcagctgctcagtcgaatatgttctacccccttcgccctcttacgccacagagatcgtcatcggccgaacgcggatcgatgcccacaagaaagaaaaacaattctctatctctccgactcagaaagtacgcgtcctttcaaagcgggatctcgaaacagcggttttcgatgggcagcgagacggctcaatccactattgactccttggcgatgcaagatcagaacaacaaacagtcagggccagttcttcgcaggcgtcgaggtggaaacctccgtcaaatgcagagtggagatgaggccgagccttcttcctgtcgtgactcgtttgcgtcttgggatgattcagccgtggatgaaatgggtagctctgatggcggtgtctcaagtcctccttcgacattgatacctccaaaaccccaatactcacttatccagccgcgcagttctcggcaaattaggcgttcctttgagtcggtcattgcgaagtttgcacagattcctgatgatggcgacggtggtatcgagtcaacgctgttgaagctggagggaaaatgggatggaccatccagcgccaatcgagacgattcgtctgcaccagcagaggggcctcactctcaccgtgagcactttttgattccgcattgcgtcgaaacttccaagcctgggtgggatgttctctctcgtaggcgacagacggaccattccgcgtattccacggttgggggtcgattggcaccacctagaccttattctgattctgttaccgaatccgaagagtcttttaactctattccgcttcttgaaagaggattgaccgacgagtccatgaaatggcagcctacaagccagccactccaatatgactcgcacggtgccccgctcaccctcgtatcgagctatgaaacttccgaacttgcctcatcacacccctcaattcaaattgtgcacgaaacggacagcatgcgtcgcattcctcgtggcgcaaccattccggcctcggccactcatgatgctggccaggttactccgaagcgcctctcagctctatcttccgagatgtcggtcgacttgattgatccgcgtgaagctataggtgcaaggatttcgacagacacccgtagtctcagttcgtcgactgttgagatcccctctcatcctctagcgcaacctccctccccgccgatgaccatccaacatccgggatcttttacttcctatccttcaccgttgaacacagtcttgtttcaggcccagccccttacgcccgacacatccccgcgacgcaaagaagtgggcatctcttcttcgcgccctctagacatacagcaggtttcgagtgatgtgttatttaattcagaaaacaatcgttctgaccagaaccccatcatcaacactttacctgaccatgtccccttcatcttagcatgtgaatcccaggtcctcgcacaccaactgacattaatcgaaatggctgccctgagtgaagttgactggcgagatctggtcgagatgaggtggagcagtgcctgcccattagtcacaaactgggtccagttcctgacatacgaagaacgcaagggtattgatttggtcgtcggccgcttcaaccttatggtcaaatggatcctgtccgagattgtcttgacccgtgacatcaatgagcgggctcgcacaattatcaagttcatccatacagctgcgcatgcacgccgcatctgtaattacgccacgatgctccagatcgccattgctttgtcttcgtctgattgctcccggttgcagagtacgtggcatttgatttcaattgaggataagcggctgttcaaggatatggagtgcttaattcagccggtgcgcaatttcaatgatttacgcgtcgagatggagacggccaacctgcaagaaggctgtattccattcattggtgagttgcaagctcgtttgcttgaatagcgcgctagatcttgttcgctaatttttcttcttctttccaggcctatacgtccacgacctcacttataatgcacagaaacccgcacaagtgaacaacactaacggcggtctacttgtcaactttgagcgctatcgcactgctgcaagaatcgttaagagcctcctccgtctcatcgacgccagtacaaagtataggtttcaacccgtgcagggcatcatcgaacggtgcttgtggattgcttgtctccccgaagacgaaatccaatcccgcagcaaagcccttgaataatctctcatttttttttttccttacctttatccttttgattgcattcctatatccatttttgttctacaatcttgacctccgtgactggatagtttataccccctttccagaggctgctttgtccctctgccattttgtaccgatacttatatctggttaatgcctctttctttggaattccttttttgtacatacctcggctatcccggcgcatttgaccttgtcagcgctcagacatttcgggaatgcccgctgtcatattggtttaggactcgctctccaaggccccttattaatttcatgtatattttgttgtctgggtttattgtctcatgattacaggccttatacgttgggatttgggtgcttctttctgcaatatagcgtgggcttggatattatatgcctcctctatggagaacgatatatttggagcgattctgcagatgaatctcgtattggtcattcgttatcaaaccctggaaaggtgttccttcttttcacatttgccatatttatttattatgtctttcccttggctgaagctatcaacttaaggtataacatcataatatattctacattcatataatgttattatatagagggatatctgattcgacaggagacatttttgcaggttaatatgggttccttacctacgatctaaatattagctagaaatgaaattctcaaccaaaacataaagcgagaaaaacctaccaggttagttgccttcattggcttcatatcctaatattatacacctcgacattcaatatcacgaaggcatgtattacaaagctgcgtcatatctcccgaggtattcggggccgcatcgcgggagctggtccaggaacggaacaccaaatccaccgcccgctcatcaccacgacctccctccaacaaccaatttctgcgcgtggagggtaccctccttacataacatatccccagagagggccacccgatctcgtcccgaactcaacccttttgatgtcccgccacaactctatcggacagccagcccgccacgatggtggacatgaccgaatcgcggcgcggggcctcagaggaccccatcgactccaatgactacagcgaccatagccccgcctcattccacgaagctaaacaggaactcccagatgatttacccagatcactggatgatcgccgctccgttccggtcttccaaccggagactgagatgtacgatgcttggcaaggtgagtgctcttgtgtccgcggaactatttccccgtttccccgacgcgggcgaccaaactatttttccttgagcagttacatcttggaaactttactggctatttgggagttcaagcattaaggtctaatcgttcaacagggcaatcacaatacctgaccgcgccagtcgccgcaaaacccttatccttcagcctagcgctcgacgatcactcgcacgacaatgagcacgaactgcgggctcaatatgggcgcgatattgaagataacgacgcccgactgatggagatgcttgctgctcaagctgcccatcgggaagtggattcgcttactgcagatgaagagacaattgccgccgacgagaaattgtccgatgacgagaagcgcgatatactccagaaaagcttgaacatggcggccagtaatggcgatgtggatcgcgtgcggaaactggtacagggcgaggccaggacttacgtggatgtcaataagcccgacgaggagggaactgtaccgttgatctatgctagttgtttcgtgggttgctcctaggtgcaaaatatcgatgcgaggctgacaagttctaacagggtcatcaagatgttgttgctgcgctcattgccgccggtgccctcgtcgacaggcaggatcgtaaccagtggagcgctttgatgtgggctatgactaacagacacaagacgatagcgaagattctcctcgataatggagcatcaccggatatcaagtcatcatccggtggtagggcttttgatttcgctcagcccggtagtgagatttctgaatatttgcatgagaatggttacaattttggctctggtaatatcgacgatgacttctatgacgctggcttggcgcatggccgtttcgaagaagaactagcagagagcgagatgaagcgacgaatgatgatggaagagagcgcaatcaatctggaggtcgatctgtctagtctagggcttgacgagaaattcgaggtcagtttatgtcgtgaaaataaggtttctcccttgactgatttgagttcttttattacatagccgtttgatgaggatgagctcgaggaagatcagcaggaatttgtctgggataagtgcctgaatgatcaaatgtttgtctttcaggaccatgagctagagcgaattttggatattatcatcaccaacatgactccccagcggtctccatcccaaaagccagtgcctgcaaatcttctcttcctcagcgcccgttacgcgcattatcatgccagccccgagctgctcgcaacgctactatcgtctgcaatggaaaagatcaatgacgttgtagaacgttaccagtgggatatgacaatgcaagccttttggttgtcaaatgccacgcttctacttcattacctgaagaaggatgggggcttagcggaatctactgtcgagttccagcttcatctggcggagttgatcaacgagatatttgttcttatcattcgtgacgccgagcgtcgaatgaacaaagtcctggatgcggcaatgctggaccatgagaccatccctggactggaagatgttgccttccaaaacgagtggaagctgttccgcaaaaataaaagcaaaaaccccgagcctgacgagaagcgattccggcctccatcgccgcggcgacgagcacaaatctcgcctcgaaatatcacatctttactatcatcgaccctctttgtacttgatctctacgatgttcactcagtgatcacgacccaggtcctctctcaacttctctactggctcagtgctgagatatttaaccggatcatgagcacgaaacgttacttggcgcgcacgaaggcgatgcagattcgcatgaacgtttcgtcattagaggattgggcgcgcacgaacaaccgcgtgccagagcattacgaaaatggttctacaaatagcactggagagtccacaattgacgccgctcgtcgacatttagccccggtcatccaactcctccaatggctgcaatgcttctcatcgctcggcgatgaccacgaatctctcgtaacaaccctgctccaactccaacaactcacccccgcccagcttttgcacgcagtcaagtcataccgcccagaagtaggcgagaaaggcctgaccaagcaagcaatgaagttccttctcgacatgcaaaatgaccccgaagttctgtatcgcgagcagcaggaaattcaagaagacaaggcaagggtagcagctgggctagggcctcaagcagcagcagatgcccgtccaaatacaccaccaaagaatcagccctccgcagcacccacatctcctgacactagactatccccaggccccgctgctgaatcatcgcgacctacaagcatggtcgccactaggaatgaggagcgcccaggcagcggcaatagtgtcttcgtcgaccccacccttttccttcccttctcccttccaactagtacagatatgctggtcagctacggcgctggctttggtggtacaaaccgcgaaagagcccgcaaatacattcccacagtcccgcctgaggtcctgagtcgattcgatcgtggcgatgtataaaataagacagccataaggactgctttttcttcatttccccccagcttggattattgatggcactgttcaggtgcctaaagtgcgggcacggtgggataaggatggctaataaagcgataggataccctttgaaccctttcttttgcttgaggatattctggctgtggcttccgtgtaagcatctgccgatgcgtcgagtatatattctaaatgaatctgttccatgcatacatagcattgtgtgcggtcactgtggcttctatatgcataccaacataggctatggctctttgcctagagtagaataatatacgtgatatgaactccatttggacagactgctgctcgtagtgaagaggaaggagaggggagaaagaaggggggggggtttcactcgtaggtgggggacattgctccttccagaaagatgataagaccggaaaacagacacttggtcggaaagaaccaagagcaggtactcgtaaacatgaataattagagctcgctcacagcctggaaccaaagaaaagacaccgagtagacacaaaagatatcagagagggttacgtgctaaatgcgcaagagtatgttgtttcctatttgggattccatcctcccgcccaagaaagccaagaaactcttgtaacttcctgacaactgtggtttttctgaagtcagagcgttgctgcccagctggcaacatgaagcccacctccgagcccccgaagcgtacgaacgggaataatgacctccacgaggctaccaaaacaaagagccagtgtctcccatcatatcttatccctcgaccatccatagaggaccaaccgacaaaccccaatcacgctatgagctcacgtcgatacctggtcttaccacccgagatcaatcgcctacctccacagccaatgacgacttccctacacccacagccagctgggtgggaggacaggaagatgtggctgcacgcaaaaatcgaagaagagcggcgcagacaggaagaagaaaaaacacaccgggctaaagttgtactggaacagcggcgcatcgaacagtcaatactgtcagatgctctggatgctggtgtcccacccaacatggtcccactaatctttaacggcatctataccactggtgccaatcttcaattagcggctgaactgcagaggcagtggtctgcaccttctgcgatgccccaaccgcaaaataacccgggcccagcgtcatctgcaaggcttccagttgcgccccagccgcctcagcagggtcctagacagcctcctcgagcacaagctagtgagctaccaccgacggtctcaaaccatctgcgggaaacacgccatacttggtggtcggaggccatgtcgaattcacatcgagcgcgagtgataaactctgaacgagagcagctgaggcgcaagctgatagctcagaacgtagagttcgctgacaaggacctgttggatacagcctttgaacacactttcccagttacgagctccatggtccaggcccatccctctcgatactgggctagtccttccgataagacatctaggtcgcaagaaaaacgacagcaagccccccagaaagctcatcccatggtttcccaagaatctggccggctgcagctaataaacactgccagtgtcacaaatgtcccatctcacgttcacccggagcaaacaaattcacttagcccgaagcgaaaggatcagagatcgcatgagaaagtccctccacctaaacatcgtcaaaatgagacattatgctgtgaacaagatttatctgatgctgtccatgtatcgagtcccgtggaagacacaattgtaagcatcaagttggagtgatgcctaacagtgcgccactccattttcttttcttggctctaatcaattattctttcggatgttgcgtgttggtcggctttcaatgttcggtggatcagcccattggggcaaatatgtctttgtgggcgttgagggtgacgttcgagctgattgcatgcttggacctcaccttgaagagcttttgtcaatttcagagataccaaatgttgttattgttactttgatactgtggattggtcggtctgtattgttattctcacttgttcttgactgctgaatcctgcatgccaggagttactagcagcagtggaaatacttgaatggattgaatttcagctttacaaccatctctctgtactgtgaggtatagttgaaaattattagaagcgaagatgccactcggagggggcgtctttcctattcgggcaatcccttttgggtgtctgtttatgctcgctctagtagggagcttaagtaacgaaacatgtagttagaagtaaaagaatggataatcatccatgtcacatttctctggaataatcaaggttgatataaagttgtcaaaactcttggcgtgtccagtatgacattcatgaacgtcatcgctaaatgaaacctgatttttttcgtgggggacttgtatatataggaagtcaattccgcttgttaccttaactcatcttcaacctctccccaccttcaacaataacaataaatcctaccaacctccaaaatgacgaccttaatgcgcctgaagactgcattccaggcccgatccccagttacagctctctccatagcgcacactcaaacacctcgcgcctccatatgccgaggctacgcgaccaaatcctcgaatgaccccgagcaagccacaaccgatacaggctcgcccaaccgtccaatcccttccaataaagcaaaacccaccctcaacgagggagagaaatcacctcttgtagaccgagaggggaatccgaaaaaagatattcccgaggatgtgaagaagcacaatcaggatatggagcagcggtatgataagccgtataacggtactgctgatgatggcacggtcaaacctgctttcaagggctagcttcctcggctggtatcctgctctgctggtgatccgtcccctatgatatgctaggttgtgagatggtgctggtccatcaattttcttttgggcttctgggttcaggcgcctgctttggagcgatgtatgaatggcttttcttatcactagatgtttttgcattaatcatgggttttgtattttgggttctctgggcttgtttatcaatatatacgtgtactcagatggacgagtgaaattccgaaaacacgtcgagtcgcttttagtactccgtagcagaacacagctcttcagatcttactctgcctactaatgaaaagtggacattagcttacatctatgttcatcggattcataggaagatcattgattgtcggtcaatctagctatccatgatgatgtacaaatcaaggcagttctcaggcttgtcccaaagccaatatccaccaaagataaaatcctaagcacattgcagcgaagtaatctgatgacacttcaaagacatctatgtgtctcgagaaagcataagttgaatttttttttggtctttttcgatagatttttgtgcatagacaggcagcttggccacgtccccacgtcgccatgtcgctctttcgtgaatatcatcaatgtgtccggaaagcaaatattacgttccaatgtactcctcagctcacaggcagcttggccatatcacccttaccgcccttgatccattcagggtcaaccagacgctcgcgctccgcgtacaattgtttgtaagcaccacgaatggttccatcactgacatgcgcaacctgggaaatctccttggcagacttgccatggcccataaggaatgaagccatgtagatgcaagccgcaacaatagacaggggagaacgtccggccaagtcacccatggcggtaacgcggtcggaaagggagacggaaacactggtgacctggtaaggaaggtcgagaaggttgcagaaacgattgcaaagatcgcttggcttggtagaggtagtcgcgttgtaatcgccagcaaaatcgtgagtttcgccattttccaaagcagcattatggcgctcgacattctgggtggtgaaaaacttctctagagccttatagatgcgaccaatctcctttcgggtgaccttggtcacagcgaagatctcggtgaaggtacgaggaaccttgcactgacgacatgcgatgaagatgcaaccggcaataatgacttcctgcgacttgcccttgaaggccttggcgtcgtcgaccatcttgaagagatacttggcggtatcagcgacagtcttctggatgttgaaaccgtcgcacagagcaccgatttccttgtaagctgctaggagggccttgttcgccttttcgccggactgcttgttttgcgcgcggtacaagtcgcgggcacggccagatcctccacttgcgatagaagtctccagttgggcgccgttgagcagagggttcgaggcgtctccgacacgggagggatcgtcattattttgatcgtcgttggagaaggtacgccattcagagtgcaaatcgatctcacggtccgcaagtacaagcccacaggaaccgcaaactgtctcgtgggagtcggggaattccaggttcgggggatcctctttgcattcggggcaaacgagatgggcggacaggtttttcttccaaggagccgcggcctcgggttttgtaagagaagtagccatattttcggttttcagataacttgagtatcgattgcggcaacgtcttgcaagtacttttggcgctatacggggtagatggtatttccgattataatagcgaaggagaagtggcgaatacagcttggcggctgtagtgaggaaaacgaaagcgggccagctgcagagaatccctcagcaagggaaaaggtcgaaaacgcaaaaaacgagctcaaggccactgttttgcgcaatcatgttagctcagcccaaaggaaatccattgtctcccgtatcgctaatttgtctgctccttaacctccaacaatgtcatgccaagatatactctaacaaaagaattttcattacctttcacaggccagagccctcggaaatctaaggagtcacccccagtcgtagaaaacccttcaccagtctgcgctttcttgggttgaaagtggaacagaaatctcgcctcagcttgtccagccgtgttgaaccagtcaaggtctccgcaagaagtctctcacgaaaatggggacaggctgaggaggagagaaagaagatgccaaggactgggggaggatgagggagggcaacgatgggatgaggtgaggcttcaataggcggcaccgagaaagggtccagatcgagcttagtaaataggtcacgtggtatatgatgtctccaaggtttgattggttcgaggaagtataggatactttttatatcaaacaaaccttctttgttcgcgtttgctgctctagataaacgaaatctaacgaggacaatgagacttcaactttggatcttggcagataagtgaaagccaacaataaagtcaagaaatttaaacattcctatacgggtggtctcgggaatttgtgtagactgatcggttcagagaagtgtggcctctcctcgtcttgataacataatgtcaacgcttgaatatagccttagccaactttcacttttcatcgataaattgaattaccgtcgactatttgttttgatactaaaatggagtgtggaagccctggaaagattcgggaacaacatggcccggctgagtcatctgccaagaaacctttccgaacagaagtcgtttgaacctccaacttcacggaaagacggatcagacctattctgttgagaaccacccctcattcctcatctacaccctcagccaagatgatgtctcaatctctccgggcctcggtgagtgctgcttgatctatagcaatcaatttcgaccctcgactaacgcgaaaagcagcgcaccctgttctcccgtgcctctcgggcacaggtctcggtcgctcgccgcaccttcctgacttccgccgtccgccagggtacgtaatttacctggggactatcttcaatataatcaagatgtcccctgctatatcgatcggtcgcattctcgctaacccgcaacccgccgcagccgaccccgtccaggacctgtacctccgcgagctcaaggcctacaagcccacccccatcaaggctggtgacgccgacgagcacgtccaaaagttctccgctcccgcgcctcccaagtctcctgaggaggccaaccttgccagcgaattgtccgcctacgagagccaggaggtcgaggtcgagggccaagccgccgccggcgaggccgcccccgtcgaggagagctggttcgaggaggaagaggaggcacccgctgcccactaaattcctctttctatttcatttagcaaggtctggggagatgcggggggaaggccggatttaaatgcctgcgccgcagctaatgtggccgcctctcgaggtcctgaagcttgtaaattagaccacatttttgaacgttgagacttctatttcccttgtttttcacctattctgcttttatgcagggtaggatttaaaaatccagggctacgccggggggttgttactaaagacaagtatttggtgagtgcagcagactcccggctagggtcatccgcttcaacttttcggtcaaagagcggggtttgtagtattcaaatgaagtacttcaagaaccatgataccacatagaagtcatctagatggtttgactgtgtggtggacaggtagcatgggcaaaatatgccatggaaccgctggtttacacaatgtgcattgtatggcttaagtaggcttattgccatgctcatgcaacaatcttccggtactgagtacccggtcaggcctcggaagtatatgcgtatggatattcatatgagggaactattggtactgactattaattattgggatctactgctgcaaccaatactccgtagatcaacatgtaacgaacagaccagaagttcatggcattgcaattgattctgatatatcaaattcatggctggcaaagctaaagctaccccgtaaagtttagaaaatcccggagcaaagaaaaggacgattcaagggggcgcaatgaaaacattggtcaccaagggtttgtacaatgtgattcatggtcgtacccgggaactcttggatacatccagagagaaaaacatcaccatttatagggctatctgtactccgtccctaactagtagctagggaaagtgatttactttggaagcgtcctaactatggatccaacccctgcaggggagattataggtagtggaaatagctccatactttggaaattgagttgactctaatcgaggcgtgtggaaagcgctgtttcttataagaaaacatcgccaaaaaaaatagagaattagggttgatgatgccattggatcatagcgaggcgatattctaacattccgtggccaagaatgagatacgagagatctgtgccggtgtacagctgtccagctgtcaaagcccactcggtgaattctgcctagtattatgttccggagaggatgcgattggtcctatcgcctgtaaagaccttgcgattggggctgaacagagagagcccaatgggctttccgaatcagacttgctgcatggcgcagagaacatggactcgagctgataccgtgagacagagcagtattacgcgatcatgatgtctacagagagaagaagaggaagaagtggagtcaaatagggatgtctcagctgaaaggaagcatctgattttaataataaaatgaagtatgattactcgtatggaataggttagaataataagttaaaaatgtctcgagttaattaaccaaggtaactaaatagtactttggagactttgcagacttgggggactatttggatttctccaacttcttccttcttcttctcttcttcttcttctctccctcacttcctcttgacattattcccccccacacacgcacccttctgccttttgcccggaccgcccttgggggagatatttcccgccgatcacttgctgaatcagagtggcgcccttgtaagcggctgcatagacgatctatccaccccgaaactccgtaattccagggctggatattattgttttgtccctctctacctctttctggctcgctgattccctcctaaagtcggcatttcagcattgcgattgtgcctcgtttgcccttcccagatgccgcgcgcctgaccactttgaaccggaacctcctggtgcacagaggagctggtctcttctacgctcggaatcttgggatttaaggggaaatgaccaataattcctatcaataaccaatctgccctccctttatcctctagacaatgtcttcgccttcactggagacgaatgatgaccagaagccccagctctctcgtgccgccagctataccgatcttcccagtcaaaccgcaacggaatccagtttaagacgtactttctccgattatgctgtgccgactttggcagaatcacccacaaaggaaaccgtggctgcagggaaagacattcttcgccgcacctctcttcgctccaaggacaggtcgaagccaaccactatctcacgtttcacattatcgtcggaggatttgaaggatgccgatttgaaggatgccgattcacatgtgccggaaaccagggcaccagagcccgctgcgaggccatccaagagccggtcaatgtctggaaggatcgtcagccttgcgaggaaaccatggggctcttcctcccgatctccgtcaccgtcagcgaaaaggtccaaacagcaggattctcagtccccaactagtttcagcggtcgaaaaacagaagatgatcagacacaaccttcccgcaagcgaacgatcctctataaacgcccacgccggccaatgctagctgttatagccaagggccccgaagacagtcccggctctccaaacagtccatctggcaattcgctacggcaccggtcctcattcgaaaaattcacagcatcactttctgtttcgaccccgctcttaccacctatgcccaagggagctgcggaaactgctgcggcgtatgcgaattccggcaccgactctgcacggaaaaaggacgagctttggggcgtctttcgtggcttggaggcggatttccaaaagtatgcgcaattacattaacccttcatattacaattgctgaccagataataggttccaagccaaatctagctcgctgaaagctaacgtcatccgtacctcgctcctcccttttctcagccgccatcacctccatggctcatgcaagaacctcagaccggaagacctggatcgccgagtcaatattcttaataaatggtggattggaatgttggagatgctcaatggcaagcataaccagtcgatatcgggaaccgacagaccggtgttcctggaagctatcgtgggagtcatggctcgaccggaatggcgcatacccttccccatggcccagaatggagatgggcctacggaatcattgaaatatgcgtcaacttcagtgtcggaaacatcggatgggtcaggctcctcgggttcggatttcctggttgaatcgattcatcacaacatccgaaacatcttcattcaaaacctcctttctcaaatgggattcgtggtcgaacgaatgtctatgagacatgcgccagctagcctggttgctttttgtggcaaggtttgcgcatatgcctttttcttctgtcccggggtgcccgagatcctggtccgcctgtggagcacgcctcctaatatgttccgacgcatcttgtcagaatcagccgggtcgcgcactggaaatatgcgtgcatacacgcaagaactcgctctgtgttttccgccggctctccgtcccctagcgtttcactcacaatcccctctgttgcgatatctacgccagaaacccgaactacccttgaataccactcatattaactggaaccgcccgtggattgcacgatgggctgggcgtgacacggacctcttctttgtcttcgtcaaatacattcatattctgtacgctgagtatttgcctccggggactgaaaaggcaaaacggatattggcacctgggctgctgatagttcacgcgcaactcctgctcgttctggaggacacgatctacaaacaatcggcacaacaggggtccgacaatccccacacagctgctgcaatcacctttgatgattttatcgagtcgccggatgcttctgcctccactcagcatcttcgaagcggcagcaacactcatcggttgatggcagagaatcgtttgattatccttctccgagacttactgtctgcatcgtcggtggaaccgaatcgagctcgattactatttgccgaatcattttgtggcataatcaaagccgcagcgcagaaaacgtctctctttgatcataatgcatgctttttgttgtgtgacttcctcgaggaggtcattccaatcatcacacgttacgcccagtcgattgaaaccgagttgtttgattggggcttttggctcgatgtttgtcgtcaaatgatgcagagccacaattcgctcacggaggtacgggtattttctttcctcttctgcatctggggtacctggactgcgacagaagaaagaaaagcatctatctgtctagacttcttgttgcatgagccggtattctatcactacttcaatcactggagtccgatggtgcgagcctattttcatcgtttgttgtgttggagggtcggtcggttccatactgatccctcatcacttgactccaatgtctatgagattctttcagatcgactcctacgagtctgggagtattacatcgggttccaatctaaggctgaacaaggcatggcagctcctttatcctctgctccctgtacacccgctccaggacgaagaatcatcattatccgatgcgagaaccaattgtctcctgtcaatcttttcgtcagctttgaccgagtcgttccacccgttccctcgaatcaactgacgtcacacaatagaaccggatcgtccgactccagtggttcagatggtcaaccagctaaacgacggtgggggatactcaaggctatgtttggcagctcttccaacccacgttccggcgatggagtcagcagcagcagttctgatgactccgagaatcccgtaccagatccaccaatgactgtggatagcaaatgtatggatgaacacgaacaaactgcgacccacagtatggacgacgagatcatccgccccaaagctctccaccagccattctttttcaaattctctttggaatggatggatcgcccgcaatggcccacgaaaaacaaacgtcttttcaccccatgtctccctgtcgcatcccaattgcacgtcgagcatcgacgttctcccgagaagtcggagtatgatacagcatcagagaacccgggccagtccgacctcgagaacgatgaaccagaaccagacatcatcaccaccgaccaagatactcccacgcagcctacctcagatacctggccgcgaacacctacaaccaagaactcccctctacctgaacttccttcccagccttcttacgatcatcttgtgtccagcaaatatgcaggccgtgccctggcggaatgggcacacattgtctccgaatgtgatagctttttcgcccgtcgtcgtgacgagggcgtccctactgatcaaatggtggaaaccccaaccctaggggttgataacttccgcaaataaccaaaatccaacatgagaaaggagcccttctcatcaacacggatcaattatagactccccgtgacatgttcaagcagatgtctgttttgagatgtttcggttcattcctcttttttgtttcttctaatttcacaacactgtgtgcatggcggatctggagcatagggaatcggcgtttacttagcctgattttgttcttccaaggatttctcatttcgtgtactaggagcgagacacgcaataatcatagtaaaacatcattcgacttgatcgtccaaagaaactgtagtagagcatagtcaactagttatatataacatttctttatgtaacaagtgatctctctctcattctaaatctaactctgctgctctgcctcccccttctcctgagcaagttgcttgttcagtaaatacagcaaaactccctgcacatcctccctatgcataaagacttcaacaagcctcaccccagatccattctgaatctgctcgctagccaacacatccttcaactcgccacaggtcctcgccgtaaaactattattcgccgcatgctcttgatcagctccgaaatagttcagcgcctgcgcgtgtctccagaaaggcacatcattgtacacctgcttgcgtccgtggatcacccgctcaatggtatagccttcgttattgatgatgaaaataataatgttcagcttctcacggatcatcacactgatctcctgcgctgtcatctgcagacttccatcgccgatgaacaaaatagtctgactcttgctttctgtgaccttgttgtgctcacgctgcgctagcgctgtgcctagtgttgccgggagcatgaatccaatcgagagccaagtgaccgcgccgaagatgcggcatttcggaggcagtttgaagttccggccgccatgcgaggcggtgcccgtctcggtgaggattatgtcgccttcgcgcaagagcgggtttaccaggcggtagaagttgtcttgcgcgagggggtctgtgtttttgatgtcggccaatgtgatttcttgtttcgggggtccggtggccttgactaggcgggtggagtcgaggctttggagtatgtttgatagaatgttgcgggcggacaggtcgcgataagtatcattgtcgatttgaacggtactgcctgaaaaggcgattgacactgcgggcttggggattgtcgtaaagtaataggtgttggagtcgctattgtgcagtccgaatgccaggatcaaatctgcctcgtcgaagtactcctgcgctgacttgtcgccaaaggctcctgcgtacaatccgtacacatttggcagctgctcgttgactaggcctttaccgtacacggttgtccatgtgggccagttggttgctttgatcagagcatcgatctgctcgacgataccaagacctgtgctttctccgtccacgaagatgagcggacgcttggcactgtacactttctccaagatgcgagccagcacttcgggctcttgtgtagagcttggtggttgaggaatgctgatctttgtttccaaatttttagccgacaccagcacgtcgggcatatcatcgggcaattcaaggtagaccggacggctgtggaccaacgcctggcgcaggacatagtcgatccgttccggcgctgtggcagcgtcttccagcctcacttgagctgcagtgacatgcttcgacatgttcgcaaagcgacggtagtcaccatctgagaaagtgtggtgcataaacgtgcgcgcgctctgaagtgggcgcggtggagttccgacaatgtgtaacacaggtgtattctcggcataggcgcctgcaatgccgttgatagcggacagctcgccaacgccatatgtagtgatcagtgcagacaggcctttgatgcgaccatatccgtccgctgcataggcggcattgagttcattgcagttgcccacccagtggagaccggcgggagtgacgaaatctaatagacgaaggttgtagtcaccagggacgccgaacatggagtcgacgcccagctggcgcaaccgggtaaacagatactctgcgagctttatatcttgagtcataatgaatgtgatattgaagttaagagagggacgcaaaacgagtatttatagatggatggaatggatccccgcatcttatcggcgacacgccgattctccgactctccgatctcgccattgttagccgacttcacccttttgtctccactggcgggacaaactccgcgagaccagccatgtcacgcctggctgcttgtgaagcctgcagaaaggctaaactggcatgcgaccatcagctgcccatttgcacgcgttgtagtgctagcaaggggatttgcatctataggactacgcccttcaagcggagaagagtcgagaagcaaaggtcagtttcatacttgcctggattgtatccgaattggctaataatatatttgcagcgtgaatccaccagataaatcgccattatttaatccaaggcgtaatccatacccaaaccctgggtatctaggatcatctagccatgcagctatattcaagcacatcactccggacggagaccatggccccggtagtcatcaagtcgcaccagaggatctgcactcggatttgtttggggacaaccatcttgtcctacagggtgcagatatcctcaaacatctcttgacaacatataagttgtccgccatgaaagacctcgtcatgttctggctagctaaaggagccaatctggccctggcagagccctttgttgaccaatgtgcccagagcgtgagccaattgttcacatatcatgacgaaaactggcatctagtctatgcaagacgtctcgtgcagaactcggccctaccgctacacttcaatgatacctctgacctggctagtttctcggctcaatttttggatcacaattctcgctgggaaacgttggggatattctttgccgctgttagtcgtgcgacagttgacatcgcgttctttccgtctctatttactactgagcaagagcagtacacactccgaagattgtgtactaaactttgtgactttgcattggagatatctctctctttagattgcttgaatgatctacaattgatcatgcaatacgagaactttatcgtccattcctacgtggatggagatcagagtaggttgcaagccgcaattgttacctccacttagccatatgttaatttctcaaaggctaccattcctggcgcaaactgggcgatgcaatatcttccacatttgcccttggctaccacgagaacatcgaaattaaagcaggaatcccgccattcctcaaagaattgcgcaaaacagccttcgcgcgtatatactccgcagacaagaatatagcaatattcctcggccgcccaccacgaatgaacaaacgcttctgtcactttcaaatcccatcctgcaagaatgcaaaagaaggctcagtcgactggaccccagacgcggaacccgggtaccgggctgacacacggtggtctgcactgtgcgcatcactaaaggaggagatatgggagcttcttcaggacaagcatgatccatcatgtgcacagcgagcaaggtattcaaaagcaacgcaatgccacaccgaatatctcaaagtaaacaatagctaatcaagaaatggcacagtgtgatacagtgccaagcagagacgcaatggcaacaactgccatcccacttccgactcgagagcagcctaaagaattgtacacaaggatccttcgagcgagacttcgtcgccggtgtacgactgcaccacttgcatgtgctattcttgcttcgtcttttgcttcttaaatcaccgactgagcccgatctaccgatcatcgagacggcgggtcagatgctcacgctcgttgtggagattattctgctgcgggatcagctcactaattctgggacgggtcttatttggaaggtatgtatggaattgacttgatgttcaaattaacatactctgtctacaaaccccccaacttgcaagcagtaaactgaaattcatactaactaggtcgcatactacggtctccccgctgcggggataatgcttctggccatgttgaaacagcatatgccacgagcgcaccgtacacggtcgttacaagatctcagtgtgtttgtggcggaggttcagatcgggacgattgtaaaagcaggggacccaaattacccattgctttctaaggctacgcggactatacagcgttttttggactcaacacattcggacccagcgcagcctttgcctgaaatgaccgaggttgaggggaatgatgagtgggcggcgttattgagtcaggatttgtgggattttgaggctgggttttggcagagtttggcggatcatccgtctttgatggcgattgagccttctttgccgtctgtctagtttatgatacctatgagtaaaatatgagttgggctggaagaaggctcttcatctcttcatttgatgtcatatactcatactgacttttgacttagttttgactgtctttgtctaataactagcattgacttacatggtagtaggtcatagccaacatccacattgttataagagtgctctttcccgctccagtccacccggtcagtaggaccctttccacatacaataaccatggaaaatcatataagaagactctgaaaatgtgactcttacataatgaaatatttccatttggaaaatgaagtactaccctaagggtggagcacttggagcgagcaagcaaaccatgtggactggcagggttggaaccctttagaagctagatgatatatcccaatatgaacgccggtgcctggggcaaggagaagctagatacattcaagaaaagatgaggatgaggcgaccaatggaaccaacagaaggacaatctgctaaggcccgtatgagctcaagacatgcgtggtatatgatgggcgtaaaaagaagttcccaaaatgcaggtatagaggtattccgacaaccaagtgacaggtgtcgggctgtacagtgctcgtttagaacatgataatagaatcaatccgataagagcggatgaagtatggcggagaagaacgacaaataggaaaagggtagatagatagaatacattaatggagcagcttgtcgctggcgtggtggatggtgttagcgacccggtcgatccaatattgggtcaatgtccaattccccgtgttgatgctgtcgcggacagcagggaagatcgagggatcgtagccggaccacagctctggcccaaagataacgtgtcggaattgtgtgcggttggggatctgtacaaatcatcagttagggccgaggaatgaatcaagcagaacgtcaacttacacctccgccttcttccaagtcaagtagattggtatcaaaagcagccattcgagcattatggttcacccgctggactgccataacattgctttcataaccacccatgccccatacagtatcgtgccagattttgttccaggactggaatgtaacagcattggctctcatctcggtcgcagccctgaacatgggctgcatgtctacctcggcgttctttgatttggcaaatttgtccaagtctttgacccatccgacaatggagtcgccgtagacttctaggtcaaatggcagcatgggattctccgaaaggtctagaaggagaagcccccagaattgagccaggattttgtggtattggaaatcggggtctgcgttattaaccatccagtcatatgtttcgtagcagctgtggtatggatagggctcgccctcaaatccgaagtcaatgctcgaagtgccagcgatatcctggaacgcaacataatcacttccagcgccaagtggagtaatctttgagccctttttatcccaaatgtctttcagtgttgcgttcgcataggggtcagagatacgacccagaacctgtagcacggtgcgctcaaaaacaggcgatgcagacacacggaaatcggggcccgcaacgcccacgtcgacattcaggtaggcaaaggcatttgcacggagatcatcgatctccttctcgacatgttcggttgagccgatcaaattgtactcctctccgtcccaactgacaaattcaatggtgcgaagtggtcgccatccgtaggtgagcaactcgccgaaggctcgtacaacctctaggaaagtagcagtgccacttccagggtcaacacttcccatgcaccacgaatctcggtggttgccaacaatgatcttcttgtcacgctcgtccattccggttattatgccgtggatgttgtagataggttgccgctctatttcatcttgcaggttcatcagatgaacgatcggggagtcctggtcacctgtccaccactctggtacgtcaggaacaccgcccacccattcctttggtactttggagccatggcctttgaggccctgcaaaagtatctgtgcatcgcgccaagcaagtgggagactgggaatcttgggtagaccggggctgtcctcgggggacagacgatggttttctcccggcgtagatgcccatccagggctgagaacatcgccaattacctgcgacatcatactgacaccgcccctttgcacgccatcgcttggcatgtatcgcccttcggggaaggccgggcctttgacaaatccgtcctgagcgggatcggagtagatgatacagccggcagccccggctaattcagcagccttgattttcaatgcgcgatctgattcagtaccatagtatcggaccaaggcaattgagccatcgagtgaaattcctttatttgcgagcagctcgaaatcttcccgggatccgaagttagcatacaccagatgcccagtgacattgccggatttcgaatggccatggaagatcaggtccttggcgttgtcctcttcgagtttcgcctcccaagctagactaggtggatcgatgatggcgactctcctcccatccttgcgtgggtagttgaggtagacctggaattcctcccgcgacacttcatcaaaccctgcattctggaactcttgttcaatcaattttgatagcgcaaagctgccttccgtgccagctacgtgggtgtagtttgtgactcgtcgcaagttatcggcgatattggtctcgttgatgtgaccttgaatgaagttctcgacggaggcagcgctataggactgacccatggccatgcgactgttgatattgaagacatctgcgatgaagaacacatacactaaggtgaccaccagtaaaagagcgaatactcggagaagcatgatgcacccctgatcttttaagcgtgccctagcgtcactaaggttgatcgtgaagcggaaagtaggcatatatcgttggaagggtcgttgtatagcggacagggtacgacccagactcgatagctgcttggaaaaacgatgtcgtagaggggtgtgtctgccggttaaggaggccgatgccgaatcatccacgtccatctggtctagctcccgccgtagttcttccaccgactctcggtctgagtgtgaggccaatgattccaggtcatccaggctagagcgcgccgattcgacggttggtgggtggtagccgcgggttgcggcatgatcgcgaccgagtagcccctgtcgttcaacatctgttccatcgccaaggtcggatcgagatgaggagggttgaccggtagcttcggcgtaagaagggatggggacggcctgatagtcaaacttctcgtcgcccattgtgggagatacggggctccggagagctgtaactagggtgtaacgcgggtgcggagatctggaggatcatgatctgtaggaaaaaggaaaatgagcgacgtccgacatcctatgccgatgaatgagtatgtccagaatccgatggagttgtataggagagagacaggagataggcaaacgcccccggagtgagagtgacccacgcttggcaactcggtactgcattacgcatcatttagagattgggcattctttaatgctatgacaacatattagtagattagaatattttttattagtccaaaccggtttgggagtcatttcttttttatatatgtatcagacctcggacgtgcagtgtcgtgcagatgttctccattatgctacggagtacataccccatccacgccagaagatgaagatccgagggcagtatcagaataatacaacacagcaaaggcagactgaactccgtacagcatagtagacggtataagtgaccacctgagaagagtctcaaagacttcattatagagaagcaagtttcgggctaattagctaaaacatccgaagtgatgccactgagccatcttgaggtacgaccgggaggtccattgctccactaagcaatgattcgaggatgagaaggaaccttccactattcaagatattaaaagatctcaaagagggaaagctgagcctggaagatgaccggagtggagacaagagagatcgataagatggcagactcagttttacaccgtagcttggatgttgagggttttaattttcaaagccacgtagcggattctaacacagagatgtaactatgtaactgtttattacctaactatgtgctagctagttacttactgtcaaagttgatgttgaagtggtaagttagcggggagtgttgtatacactgcatcacggggtccacgagtcacgagtatagcttcacgtccaaatctccccgtataaccacttcttatatatctcctggggaattatccggcccaaaggaactgcaagagaagtagcaaaagagggcagatctccccactcgaagaaaaaaagaaaacgcgaaaaaaaaagaaaaataataagtggtgacagatcgtacacggtagaaccgagtacacagactccttttcattcttatatcagtcgccttctcttcagacttctccctcttctcttgatcttaacctcaacctccttcatatacttcatctcagtcatcttccttcaccctcaccttctattcctcttataacacaaagttacccctctataccccccaccatggctactcgtccccaaaacatcggcatcaaggccattgaggtctatttccctactcaggtaagggttccacgtctatcgtatcccctgggatcgatgctgatttgtcaattgtagtgtgtcgaccaggtcgagctcgagaagtacgatggtgtctctgccgggaaatataccatcggtctcggacagaccaagatgagcttctgtgatgaccgcgagggtatgtgcacgggcatattccaaaggggatcaagaccaatcagctaacctttctcggcagacatctactccatgaccctcaccgttctctcctccctcatgaaaaaatacaacgtcgaccccaagtccgttggaagactcgaggttggcaccgagacccttttggacaagtccaagtccgtgaagtctgttctcatgcagcttttcgctccccacggaaacaccaacatcgagggtgtcgataacgtcaacgcctgctacggtggcaccaacgctgtcttcaacagcatcaactgggtcgagtcctccgcctgggatggccgtgatgccatcgtggtttgcggtgatattgctctgtatgccgctggtgctgcccgtcccactggtggagctggctgcgttgctatggtcatcggccccgatgcccctatcgtcttcgagcccggtctccgtgcctcctacctcacccacgcctacgatttctacaagcccgacctcaccagcgaataccccgttgtcgatggtcactactcccttcggtgctacaccgaggctgtcgatgcctgctacaaggcctacgacgcccgtgagaagaccctgaaggcccaggccaacggtgccaatggtgctaacggtgccatcgacgagtccctgacccctctggatcgtttcgactatattctgttccacgcccctacctgcaagctcgtccagaagtcctacgctcgtatgctctacaacgacttcctggccaacccctctcaccccgctttcgccgaggttgcccccgagctccgcgacctggattacgagaagtctcttaccgataaggtcgttgagaagaccttcatgggtctgaccaagaagcgtttcgccgagcgtgtcaaccccggtctccaggtcgccacccagtgcggtaacatgtacactgccaccgtttacggcggcttggccagtctgctcagcaacgtcgctttcgaccctaaggagcccaagcgcatcggtctgttcagctacggttccggacttgccagctccctgttcagcgccaagattgtcggcgatgtgtccaacatggttgagaagcttgacctccagaaccgcctcaatgcccgcactatcctcgagcctgctgcatatgatgccatgtgcaagctccgcgagcacgcccaccttaagaagaactttaagcccactggtaacatcgagactattggatccgatgtctactacttgactgaggtggatgacatgttccgccgcaagtacgagatcaaggcttaaagtttctttgatgttctgcgattgcctttaccgttcaatgtgttgtttagacggttcaaagagattcccccgagcgttttgagtgtttcgtcaaggtgcatagaagaccttttttcgttttccttttttactctttcggttaggtcatttcgacccacatgaaatgaatgtcatgaaataattaaaagacaaattaatgagatacaattctaaaataactcggtactaaaaggtcgatattaactacacacaatgtgcactaacagcagtgaaacaccgggggtcaatgcacggttatgggttgaccaccccgatttaaccacctcgatttgatctcaacctctttctaggtgtctcctgcatgaactcctcatcaactgcattaatcgttgctaattatgggacattgcttagtttcaaggatcaaactatccaatcactggatatgacgccaggtgcccggcgcgtacatcaaactcatcaccacacatgtagccgccgacgtcgatatcacattcggccactggtgcatctagagcagctactctcccttcaaagggtctttttaccctgctcagaccatggaaccacacatttcataaccccgatggctatttttatccgtttgctttcttggaacccttaaccgctgaccccgcgagtcctgaagcagaaaaagtcaccaacaagtctgctaattaccctgcaatgtgacctaattgttgccgtttttagaacgcctcgagaatcttgcagcaggctaaccatttgaggcaatctgaagaacgatgttggagaaaatgcaaaatatagtaacatcttaacgcgcgacagtccgatgaaaccgcactataccggactagacccccttcgaggggtagtttcaagggcttgttgctcaacatgcctgtcttcaggcacaatgtcggcagtttcgtgtttcatcgagtgggtatgcctctgatcggagactaggatcccaaaaaaagattctcaaggcgttacaatggggctcttctccatgtttcatcttttctagatcgactagggttcgtccgtcaatctttttatatacaccatgcttggctgtttgagactctgtcgatgttcatttaacatccagacatcctccttctgaatcatgtctctgtgaacgacttggtcagacatcagatccttattcgtttgttactcttatgatatattgtttcggtgatatacctagtcaacaacttcactatcatgtctgctgtcgattccgctcgctttcggctaacgacgccgccgcgtctttctcttgaggagtacatcggctctggacatagtcgtcatgtctccaactcttccgtctattcaagcgagtcttctccctggtcgactatgactggaaataccagtcctaccacctcgccaactagacattatcatggcccgaagctattgccaaagatcaggcctcaagacgtcgtgattgagccagtgtctgctggcgggcctcttcgtaaccgtcgcgttctctctaatacacggaacccgcctcctggattcatcccttacccactggtgcggccatctgtcaaccgcacacaagatgtcgcggaccgcttgacattggcctctcccatctcgccggcgccaatgactacgcagggctgcttccctgccttgtcatcgcccgtgactatcaccccttcgtacaagcgcaaggcaggcgggagccactcacgctcagtatcggcatctgtcatcgatgccgccactttgacccgatttgggtatcccacctaccgggagctgccaaaatatgcgcctcaaatgcaggcccagacgaccccgaccaccccagttacgccaattaccccaaacatcatgccctatccatcatattctcaaagactgggggtgcagaatgctcctgcaactccattgacagtgccgacacctcaatataactaccgccacgcatcggctgctcagcattcaccggtctcgctcagtccccaggaaaacctaaccccaaggtccactactctactgtcatacctgaccttaccaatccaaccaatcaatctagtccgcaacgttagcgtaattcctactcgcggtctacacgattacttctggtgggacatccgtaacctgcgcagctggagctccttctcactggcggcattcgactccctggatagccgactaattcagctcctgaagaccgaaatcccagcagagctcacaccgcacgtggcggtatccccggcaagcctagcgccagaatcagaacacgacctagtgagcctaatccgcgacctctacgcaccgcccgtaaacgccgccctagccgtctcccaaggcgaagaccacctccaactctacgctgccccagacgtgcgcaacacaggccaaaaaaaccacggccatccgcacttcctagcaaactatgcctcagacactgagcaaacaagcgccggtctcccgcgcggccgactagttggcatcgtgaaaagcttcgaccgctggaacaccggcatgcgcaacgaagccccccacaggcgcgtaaagtacctgaacggactcgcccacctgcagcggtgcatgcgcgagcactcctgccgctacggttttataatcaccgagatcgagctcgtctgcgttcgagcaggctgtgacaccggcgacgacatcccctactttgggtacctagagatcgcggcatcaatccccctcaagacagcagctacaaggagcgggcgtgcacacgcgcgcgatgcacctctcacaacacccatcagcgcgcgctctttctcgtcgtcattcccctcgcatcatgactcctcggacccggacccggttgaggatgcgttgccggctatgacggcgagtctaggcttgtactttttgttgatgctttcaaagtcggtgccgcttccgcatcagccttctgctcatctcaacgttggcggacctggtgcgatgactcgtcagaggattttggaggagccgaaggataagtggattcctgagccgcaggttggagagaaaagggatgctaaaagagtgagaggctgggtttggccttcggatccttggcatcggagagaagggggtgcgtctaggcggaaggctggcacgaaggctggcgcgaagacaaagaaatggcataaatgactctattttctgtaggcacaagtttggcttttatgatggatgtttgggatttaagtatattttgtttcgtttctcttgttgcttttcttttttggtggtttttggtgcctgttattcccccctgcaaatctttcctttcatagtaatttaatttcttttcttcttctcgtcttgtctcatattgaccaatcaaattgggcttcatggatccgtcatgaatatatattggaaggtcccagggtttcaattgaattcaatttcttaccttgtttcatctccgctccagggctcttatggatgtacacagtggccgttatagagctgttaatgcttgccgtaccatgtctaatgtggcttaattgggtggaggttcgaacaagaggccaagcgaaatcagcaacattaaggatttgtatcggatttggtgcatttttttctctggatggaattcatggccattgatgcttatattcacattgctagatatggcttgtgtatgtatgtccaacactacatggaaatgcttaagtataaaggccaaaatgattcaagtcatccctaaggtcctcaaagattgactccaatgtgatcaaatccgtgatgttaattgtggagtatgaagctgtcactatatgttgtcatccctcaaggaccttggggacaagtacctcgatagtcagctcacgaggacattgtagaaatatagtcatgcccgtagaatataggctataaagaatagtatttctcctatgatcgtacgttcctgcaaatttactattttgttgtactactataatcactacatttttctcatacaccataactctagccctacctcgcctttctaacatgtcggtatcccaagaattaccagaagacgatgagatccgcgatgtaatcatcatcggtgcaggaccatgtggcctcgccgtcgccgcacgcctaagcgaagaaacaccatcagcagtcttcacagacgaagaacaccagcgctatcactggataaagaagcacagcgggcggatgaatctggtccaaggacgacacggcaagattaagggcgtacgagccgcaaaatgggatagcgaacgccgatgtcctcaagaagacccgagacgtacctctgaccctgcgtctcctgtaccatcactatcttccgcatcgtcgacgtcgtcaacatcctcgacatcatctatctcaactcttgtgctcgatggctctggggataaatggatgcagcggtggcacaatgcattccgcacgctggagatcaaacagctccgcagcccgatgttcttccatgttgatcccggagatcgggatggtatgctggcttatacacaggagagtggacgggacgcagatctttgggagatttctgggtgcgttgggaaggagatgagtaaacataagaagaagaagagaagacagggtgggcaaactcagtaagtggtgtccagtgcgaatgtggttgaaacaaagctctaaccatgggatccttgtaagcagaacaattggagctgaaatagacgaacgtgatcggaaagattacttctcgccttccacagaccttttttcggattattgttcgtcgattatccagcggtatgctctggatgagcccggtaaaatcttgcagcgtgaggccacggatctctcgtatgattatctctccgatagttcaacctcaaagctgttcactgtcaccacatctaccggagagaagttttatagtcggtctgttgtcctggccatcggccctggcggagcaggtgtatcgaagatttatccgtggaaaccctcgacggaacaagagggtgctgcagcatgttgtcacagtacggagatcaaatcatttcccagccccaatgtacagaacaagatccagcggcggcaggaaaccaatgttgttgtcgttggaggcgggctgtcgtcagcacagattgtggacatggcggttcgcaagggtgtgacgaaagtgtggttcttgttgcggtccggcatgaagggtatgtataacatccccggtaatcgttgaattttggacaatgtctcatttgaataatagttaaacacttcgacattactctgtcatggatgggcaagtacaaaaactgggagaaagcagccttctggtctgctgataccgatgaaggtatttgttaaaaaagccctaaaccaatctaaagactgacactaatatatttctcagagcgccttgagatgcttcaaaccgcccgaaatggcggcagcattacaccacgctacacaaagattgtaaagcagcacgcagctaaaaaccgcgcctccatccacccttgcacagtaataaaaacccacgactacaatccagtaaccaagacctggaccttaacaaccgacccaccaatccccgacctccccgcgatagactacatctatttcgcaactggagtacgggcggacgtgcgcgagatgccgctgctccgcgaaatgaacgataaatacccgatcgaggtcaagtcaggactcccatgtctaacgaatgatctatcgtggcgggatgacgtcccattattcatgacaggccgcctggcatctctccggcttgggcctggggcgccgaatctcgaaggcgcgagggtgggcgcggaacgtgttgcgtggggcatggaggaggttctgcataaggggcgggatgttggtgggcagtgtgagggcttctgtgggcttggtaatcggtatgcttcgctgcttggggagtgtgatgaataaactttttctcacatcgttgtgaaggatggtatcataatgcacaatatacttgttcttttggactgcagatcatacttttttggatctgtgacgaggtgattggagatagtacgacatttatgctggatatgtacattgcctgctacattcctccctgcattccgtgaatttacgtttcagtcgccagagttatccttgactacccgaggatactacggggaaggctggaaatttattgggtcagaagaatgctgttgatctcttgttctccaaggctgtatactttcaatataagatagctggtatagcaacatggggttgagttgagtctatacggttcgacttcactttttctaggaagcccaatatttgctagagcatataacatggcgacaaaagcagatacattggagaaggagccccctatggagatattcaagctcctaccgaacaacacaaatccaaattggatcaaagatagggggctccgtaaattgaatttggctattgtgttcatgttctccagtgcttcttcggctgggtacatcgcaagtcttgtgaatagcttgtttgtcctacctgagtgtaaagtctccatcccgatattgtgatatttatgctaataatgacatagttggtgctatcattggcggactagaccccaatatagttggtttgataattgctgccacttcacttggggcgttagtctccttcgcaccggcctcttatattgctgatgcattcggacgaaagacgtgtattttcattggggccagcattgtgatcgtgggagctatcatccaaaccgcagtcaaaagccactgggccttttttggcaccagagtcttgtccggtatagggatgggcatcgcccagactgcatccccactcctggccactgaaatcgcacacccacggcagcgacagacggccacggccctgtacaatgcatcctggagttttggcgtcattagtgcggcggcggttacgtatgcaaccataggaatagcaaatagttggtcgtggagacttccttgtctgctgcaaatatcgttcccgttgttttcaatcctagggttgatcatgtttgtgcccgaaagcccgagatggcttgtgtccaaaggcaggaaagacgaagctctgagtattttggggaagtaccatgcgaatggagacacagacgacgagctggttcagtatgagtaccgtttgatatgcagcacgatcacagccgagatcaccaataccacggattggagctccttcttctcatcgagaggcgatatgcaccgattaaccatctgcgtattagtcggacttatgcaagaatgggttggaaatggtatgtacaacgccctaaaagagacttagtcactaacggcatcgcaggcctcttatcctattacctcgcaccgattctcgcatcagtgggaatcacgaaggcagccgaccaagctgctgtgaacgtcagcctcaatgtctggaacttcctccttgcggcagctggtgcatttgcatcggaacgatacggccgccgcattctatggcttatttccacgggagccatgatcgttttcctgtccatgtccacactggccgctggtctatttgccgaaaagcatcttcctgctgctgggatagcggctgttccgctcctgtttctcttctttggtgcatacgatatcgcttatgcgcctctcttcatatcgtatccagctgagatcctgcccttccaactgcgtgccaaaggcattgctgtcaccctttcggtggacgctgtggcgtgttttttcaaccaatatgtcaacccagtggcgtttacggcgattgcatggaagtattattgtgtctttcttggctgtctgatagtgttcctgggtcttatatacttactcttccccgagacgaaagggcggtctttagaagaggttgctatgattttcgacaaggaaaacaaatcagagggtgacacagaagaccgacaagatacagatataatatagatagtggccatggtggccaatcaaagcctggctgatgttgctgatgtttcccccgcagttgcaacgcgcagttacagttacagcgcgtgtaaattgcaacctctcgcgctgaacatttgttggttatatataactatctctactctttgtttagccctaacaggataaatagaccttgtcagagtcgaaaatcccctcaattattcgtcatattgtcatgttctagatccaaaagctccaaagctatcccaatatttcaaccaaacctcaaatcaacatgaaagaaccaataccacctcccacggcgagtactcccagctactccttctcaccatcgaagcaactgcggttccttgtcatcggcgccggctctcgtggaaacgcctacgcccgtgcagtcacaaccgtaacaccgggtgtaatccacgcaattgccgagccccacgcattcaaacggcgcgagttcggacgaaaatatatatggggcctatccaaatcccatccagagcctcaagagggccaggaattcatagattggcgcgaatgggtgcagtgggaactggagcgacggaagcgggcgactcaaaacaatgaggataacacagcagacataagcccaactcccgtgggggtagacggcgtcttcgtctgcacactagacgaaacacacgtcgagatcctacaagcccttgctccgctccaactacacattctctgcgagaagccacttgccctctcgctagacgactgtctaacagtataccgaactctccaaccaccagaaggcccaaacaacaccccccaagccccaaagaagatattctcaatcggccacgtcctccgctacagtccgcacaacatcctccttcgcaaactcctcctgacagaccgcgcaatcggcgacatagtctccctagaacactgcgagccggtcggctggtggcacttctcgcacagctacgtccggggcaattggcgacgcgcaacagcagcgggcgacggttccctcctcacaaaatcctgccacgacattgacttcatcctctggctcctctgctccccaccctcacccgaaacagcatccaaacaaggccacaagccgcacttcccgcgctcgatctcgtccgctggcacgatgacgcagttccgccaaaagcgcaagcctgtttccgcaggcaacgctacaaactgtctctcctgccccgctgaaagtgactgtaactacagcgcggttaaaatctataatgaccaccatctcgcgacgggtcatacggcttggcctgttgacatcgtctgtccggatatcgaagatgtgttccgtgcccaaggcggcaaggctgccgagtcgctgctcctatcctgtcttgccgaggactatgaccgggatacagtgtcggactcggatatcgctgtgcgaccttggtacgggcggtgcgtctacgaagcagataacaatgtctgcgatgatcaggttgtgacgtttgcctgggatgatgaggagacagtgccgcatcggcttgctaaaacggcgagtttccatatgattgcgccaacggagaaacagtgtgagcgtcggggccgggtgtatggtactactggcgaggtttcttatgatagtacaactattactgtttatgattttgctacggcgaagacttctgtttttgatgtgccgaagccaccaccggggcaggtcgaatcgcatggtggcggagacttcgggcttgcgaagcagtttgttagcgctgttgaggcagttgagggggggttggatgttgagactgcacaagcgaggtttgttgggtgttcactcgaggaggcggtgcggagtcatgctgtcgtttttgcggcggaggaggcaaggagggaggagagagttgttaagtgggagagctggtggggagagaagttgagggtttctgctgctgcgtggaaggcataattacatagatgggtttgatgatttacaattctacgatgctacgattctatgatacttttgtttgatatctggtatagtataggggacaataatgcatatgcttcattagcttcatagacctggaggtaagccaagacaaactcggattataataaagatgcagttcatctcatgccaacgtatactcttctaatctgatcctgcttttcgatcatcattcttctcgcgtccagatataactgcaaaacaattataaggtgattcccatccagcaggttccacattgaccctaacaacctaactaaacttaggtcttaacgtcaggctcctcgcggccaacatactccttgaacttgagcagagaaagcgccagagagatgttatcagccaggtactcctgagcagtgagaccgaacttggacttgtcggcctcgtagcgctcaacgtacagacggatagtagcaccgctgctgccggtgccggacagacgaacaacaatgcggctgccatcatcaaacttggcgtacagaccttggttgctggagacgctgccgtcaaggtcggtgtatgagaagttgccagcgtcaacgaccttgcgaccggcgatttccgagccaacgaaagtgtcgcggttggcaaccaggtcggacagagtgccaacgaccttgttggcgccctcgctgtcaacgttctcgtagtcgtagcgggtaaagaaggtgcgaccgtatgtctgccagaactcgttctggatggagccaatgctaggggtctcgttgggcttttgcttggcgacaccggcaacgatgttcaaccaggccacgatggcccacaggccgtccttctcgcggatgtggttgctgcccgtgccgaagctctcttcaccgcagatcgatatcttcttgtggtcgaacaggttgcagaagaacttccagccggtgggcacctcgtagctctgcagaccttgagccttagccacgcgatctacggcaccggaagtgggcattgagcgggccaagccgtatacaccctgcttctggaagtacgggatgagcttggcatggtgggcgatgatggccaagctgtcaccgggggagacgaaactgttggcaccgtagatcatgttacggtcaccgtcgccatcactggcggcaccgaagtggacgccgttcgcatcgacggcctccacgagctcgtgggcgtacacgaggttgggatcggggtgaccgccgccaaagtccggcttcggctggcagttcattgtgctgctggcgggcagaccgagctccttgacgaagatatccacaccgtagggaccagtcacaccgtgcatgccgtcgaacaggaccttgaagtccttgtgggagctgaggaactccttgatcaaatcgaaatcgaagatctccttcatcatggtcacataatcggcggtagagtgaacgatctcaacctcgaggggaccgtagttcttggtgccaatggtggaggtatcgacatcaggaacatcgaggtatttgtaggaagtgagggccttggcagtctcgaagatcttgttggtaatgccctcgggggcgggagcgccgttggccaagttgtacttaataccaaagtcgttctcggggcctgaaagtgtttggtcagtctccagcagatctcgtaatactcccgaccatcacttaccaccggggttgtggctggcagtcaagaggatacctccagttgccttccgcacacgaatgaggttgctagcagccggggtgctcataattccatgctgtccaatcaagatcttcttaacgccataggcggcactgatctttgcgatcttggagatgacctcggggttgtagtaacggccatcgccaccaatgacgaggaaggaaccctcaacaccctcgggaatcgacaggagaacactagtaatgaaggactcagagtagttgtcctgctggaagaccttgaccttcttgcgaaggcctgagctgggagcaagttagctagcagttcaattgtggggcaacgagtaacgtacgttccaggcttctgatcagtgaagggctggatagagactgtctggacagacatgatggaataagattggaggggaagaggtacttaggagaataggagaagaggggaagaagttcgagaagttcaccgacttgttgagctccacggagaggggccaacgtttggcgtcatgtgttgatcattccgctagtactcttgtagtactttgccacaacattttaatctacttcgtatgtactctgtacagcccaaggctctgatttgttctattcagtctaatctataagttgttcgtcaagttactcttagaaattgtccatcgcaggtcattccggcgggggaagcaagagcctgcgtcttgtacaacaacattattccaaagtatattgtacactgtatggagtcttctcacattagggaaatgtagccgaaaacaatggacaagttcaacatgcagagttttaaactacttcccagacatgtctcagagtaacagagaaaagcaagccaccaaatcagccacaccatcacttaaacagcttctccttatagaaccggatctcctcaatactctcaagaatatcatccctagcgagatgaacctcccgcttaggcgggacctgctcaagcagttcatcactcccccatcttcgcgccgcctccttcaaggaactaacatctagtatgcgataatgcaggtgatccagcacctgcgagtacggcgtacaagcaaggaaagccttatcggcgtgaacactgttgcccgcgaggagggcagtgcgcgggaccgggacatgttggcggatgtaggcgaggagcgagtctgcggcggtggagggggaggtggtcgaggcccgcacggcagcggtgaggcccgtgcggccgtgtgtatcgatgcaccactgcgacatcgcgtcgagggcggagtctgggacgtggatgacggtttcaaagccggtcggttcgaggaggtttagttgggcgtctgtgatgaaacagcagatctggatgattctgtcggtttccgggttcaggcctgtcatcttgtgaatggggttagtggtgagaattttgaaatgcgctgtagcagggtttggatcggagatgggacgtttagacgtacctcgcagtcgatccagaccaaagggtctgtcgaacgttcgagtggcatcgtggatttgtagcggataggggctcttcctggctattgaagctgttagtgattcgaggttcaattggggcttggcagaatctctctgacttggtggagaaagccgggctggaccagaacaccgcggaatgcagatgcacgtagaaagatacttctgagcatggatgtgtagttgaggagtttgaaataggtagatttgtctcagctatagcctacggtttagaagcttatcggggtttaagccggtctagtaaatgcttgacaaacgcagtcagacggacaccggaaaccttttaaaatatacaatctacgatgtatacagtgacttctctcggcgtacaacgcctagttcagccttaaacccatgatcaagctgccctgatcggtgcagcaaatgtatttctccttcaacatgttccctgtattgtaagtagtggacataacggcgtaattgtagaaaagcaatatttatgaccatccagaagacccagtaaatccaacgaagatcccgcccactcgcagaatcctatctagatccataggacgcagcaaaaacgaccagtgctttccaaagcgaagagtagtagcctgtcaggcccaacggctcaagcgagatctcgacatcagatgtaacctattttcgacgatcacagaattacaactcctcatcatgttctgggggcccagcagaaagatcaggcgtaagactgaacccatcaccgaatatcttcggactggtgaaagttgattccgttggagcggaagagcctagagtttcattgattctaccggactctgcgatccggcgtctaagggcattctcatctgcggtcgagacactcccccgctgttttttcagtggactaccgaaaaggccatcttctggttcaacggctagcagagacggctcggtgaggtgcccacctgcagatccagctgcggcagcctttggcggtgtttctgagcgctgttttacaggaggcgtagatccagttccagaagccggcgtatcggcagagtcaccgacactgcctccaggtggttcggcggagtgctgacgcttgagctgtgatgtcgttagcagagaattcatagaatgttagaatgatacctactcgaatctttcgcaggctctccgccagctctccctggcgttgaatgtcatcgggagagaggaaccgatcgtcatccttggcttcttcgtcgtctgccttgccaagtatggggttgtcggtgtcgtcatcatcgctgtccatatcgtcgacgctcttctttcccttccgcggcttggcttcgctgtcccggaaattaaggaatccaacagagccaccaggtttgatagggccgaggtttgcaatatcagcttgtatggacttgcgcttgctggcagcaggcgtctcttgcactttggcatctttcaagatacccatcttttgcaattgacctatgttgatgtaaaattagcaaccattcccatcaagagcgatccaggcaatacttacgctcaccacggtacataaaagtgaaaacagcgtatggtttatcagacgggtcaataccagtaacagtctgcgtactaatggtctttgggtcgagtgactttggcttcgcgaaacttgtggtatggtcaacatcggcgtctcctccaccgctgttatcttgaccaccctcctcatcgtcgtgcgcatcaaattgcggggagtactcgccccgcttgatctctcccgatgccaaaacccggaacaaagcaaccttaatctggcccgccgtctcaggaattggatcatcgtcgtcagagtcggaggagaggtcatcatctgaaacatcctcgaggggcgacttctcgtcatttccgtatcgcataatactcttggacttggcgggatggttgtcctccatttccatgacggtcgggtcctcgtcagcggcgcgctttgcacggcgcttctccatcttctgtcgcctgcgttcaatcttggctgctgcatccttcccttccaggtccagtccgttaagccagcgctccagaccgacctcgcggaacaagaactcgcgctcggcaattcccccgccttcgctatccggaacgctgacccagcgtgaattcacccaggtctcttcccctcgtcgcagtagtgtagccacctcctccttttgtcttccgtcgaagtagatgtatgcagccacggtctcgttcgccgaatttgtcaagccctggtatggtgcgaccgtcccggcgatttggcctgattcaccggccaatttccctgccacttttggtttcggccaggggcaatctgctgtcggctttggggtcgagtacgggacatcttgctcggggtttaggagggtgacggaaatggcgaaggttgattgttccgctttgccggtcccagatttggggattttgggtggaggaacggggataaaacaacctatgcgcgaggctcgagaatggcgttgaatggaatattcggggatcgggccatcgggcgtgtgaatgctcacggcaagccctttgaagcagggcatggtgggaatgggttaagtggaatatgggtgttgcactgtggggagaagactccaataaagacgcagggccagatctgccccgcaactaagacagggatacttcaggcaaaaacacgaaaaaagtgacgccaaatggaggataggcaaacttctttcttagtagtttttttctcccctccctcgtggagttgaaagaataagctataggtgggaggcggtcaaggtagtgggtttccacttacccagcagcccacagcagttccttgagctccactgcagctgctggtatgtttgtttctgggtttcaaaatggagggtcacgatgacgggggggtcataaatatcctgaggagtggtttgaacacacgacaatatggcttccgggctcaaataagcacataagacgtcgaaatgcgaacagaggaatggaagtaagaaaagtagaagtgagctctctcaaggacaaaggtgaggggcggaagtggaccaaaacatgagcgttgccatccccgaactcccacgtgataatacctatcaagcctatagtagcctacagcatgcctacttctctagtcatcgatagtcgttgatggtctatcccatgactctacctggtgaaataccacgattcgcacctatttatctaccaaaaccatcccagtcatcgcaattataccaacattcaacttgtccaggtcatatctccacatcagctgatctcccagcaaccatggattctgcgaaaccgtgtggagcacattttcccttctttggggttatcccgccgatgggagtatataccctgcgaaatcttttatcttttctaatatctagagagggtcaagtctttaacaaatctcatttgcattgtttctcaattgaatattcaaagatcgggagctagatgcaacccggggaacaaaaaccgcaatcggaatcaatccgagtcatgttgaccagaccgatttacgactttccgtggtcagagaaaacactctgcctccgcgacaagataacatcctcgttagcactcgcaagatggtcaaacttgtagagaggctccagctcaacattttgacggaaaatgtagcgtctgaaccaatacggcagcgccttggtgacttgatacttcatgtggacccgagtagggactgcgaagatataatccagttcttcaagagtgcgctgcttggtttcgggaacccagaggaaaatcataaccatggcagttacgttcagaccactgaattctaccgttagatatttggtgagaaacttgcaatatgggtagaaagacttacgcatagaaggcgaatgccccagtggcagtcattgcactcaacattttggggaacgtgattgagagcacggcagcccaacctaggcaggttgccacggcccaggacatgccaacctctgataccaatgttagttccagaaacaatattaagggaaaaggggaaccaaaagtgagaaacataccacgatgggaaagagggaatacctccgccgaataagtgaacggcacgggtccttcaccaggcgagtaaaatgcggcgaataggaagacaaagaaggcgatcgaagcgagatgacctgtaccctcgggggtccagaaacagaaagcagcgccaagcaaagtccatgccatctgcgggaaagtgaacaacaatagagtccgacggccatatgtatcgatggtccagatagcagggaaggcgaacacaaagttaaccaagccgaatccccaggaagcaaacaaagcctgtgtatcatttgcgccggcgttcttgaagacagtcgacgagtaaaaggcaacgatgttaataccgcacatctgctgagcgatcatgacaacaaacgaagcaagagtggcacggcgcacacgaggaatagtgaagagctcgacgaagcgggtaacatagttactattgccgattaggtccatctcgatcttgatctgggtatggatgtagtaaagatcacgggcggcctgcaaaggtgtgttacggagacggcataaggaccggtaggccttgtccatctcgccacgtcgaatgtaccagcgaggcgactctgggcagaagtaaacaccgaataggagagggatggctgggatgaaggccgatccgagctgcagacgccaggagattttacctgtatccttgacagcaaggttggcactaaatccgaggaaaataccaaaggcggtccagagctgccaggacatgaccaaaccaccgcggatgacagcaggagtattctcggcgcagaagattggaattgtcgaggccttcagacccattccaatacccaggaggagacggaccacaaacaactgtatccagttctgggtcaccgcagagccaatgggagtaaggacacagaagatagacgcgatgaagattgtaccacgacggcctaggatccgattgcaggggtcggagagccagcatccaagacaagcactagcgatgtatggagcagcattgacgataccaacgagccacaagttccgattggcgtgagcactcttctggggatcttctgaaataccaaaagcatcggggaatgacaggttagcaccattggagccagtctggtcccaacctctgtatttctgttagggatgtacctagtgtgtgtactgggggaatcacatactgcacggctgcaccaatagagcacaggacaatggtgaagtagagtgatctaggctggcgccatttgtgagccacttcgtcacgtagggcagtgagctccagctcagtcaagtctgccactgtctcgaactcggcagggtcacgcgcaacaagcgctccttttttcaactcaggtaggatgtttgtgacgttgtactcctcagcaaactcttccacgttgcggagtacctgagtcttggtcaagtcggccaaggggttcttgatcctggttgatgttggtacactgagagggaaaagagatatatgacaggagaatgaaatgagtgaactttacctagcggtaacattgttctgaaggtcaacttgctcaatgtatcccttctcggcgctgttttgatcattgctggaactattggaactgagatgagcattgcaaagaacataaggaagatccaaatcttaccgctggccagagtcgacctgagtgatgacctcttgaaccattttgacgattgcctggtcaagctgttgatagaaactaagaaagaaaccagagactgtggctgagctggctcttttgatggaaaaggggaacagatgaaggctgatagaggagggtgatggagaaaggatggtagaagggtgatggagaaagggtaatagaggaagggtgatagagagaaagagttggaaacccaaccaacgatttcagttaccagactagttcgtttgatagtgaatcaggctccagagacaaacaaaatcgtgaatggtgactattttattgaccttgggggaggggcaccttttatatccattgaatcttttctcagaccagtccatttgaaaaggtgcacaatatcattggctagaataaaagatgtcaaagcctcacgagtgaagctccaaggaacgactttctacttcccgaaacggaatgaatctggggatccgcatcggattgcccacggggaaactctaaagtctaagaaaaatggagacaaagccaataccccagacttggtctcggcaaaatactacattgaaagtgctctgctaccttggtgaacaaggctctcggcccaagcacaactacatgcagccaatgatcctccaggatttgtcgcttccgatcgggatttctgtccagaccggttcaaagtcgaaaattaaagtaagccttctaccgttaagccccaggtatattctctttcaattatgcggtacttgtctccatgttatgcaatcagatcttacaagcccatccataattcctgtcggatacagatatgaaaagtaattctcgcgaggtatcagggtcgccgctctcgatattggcgtctcagggcgagcgccacattcgcctctagacaggggccagaattgtgattggcgaaaaggatttaggcatatggctgagagccagtcattttttggcgctaaattaggcttaaaccacgttcgggcctgtttccggcgacttcacagggctaagatgttcacgtggtcggcatatttgcctttgagcccgcatcgagacccaagtcccctcggttataacgactataaaaaatgacgaacatttgaaattgagacattttccgaatccagtagagagagggagagggaaaaagtggaaatccggggcaatgcgggggatatactctaagggcagtctatcacctcggggatgaatttccctctcggagcccaaccacggtatgagggaaatatcggaaatggtactagggtttcatttaatcccgatccctagtcaagttatcccggtccccttcaagccgtgtgccccataagcgttagttactggcattaaaacaagtagccccagacacggcaattattccaacccgataagttagtcccggaacatggcgcgctgatcctaaagcggcacattgaaagatcatcgccatcatcactcaatttactgtgaccgcccccggcgatatctcgaggttcgagcgggccgcgtctagggttgcatcgtcaaggtgctcgtggctggccatgtggagatcaacgtgttttatctggggaaatattttgatatgcttcggtaacctctcaacgccccatgcgagtcatgacatcgatttgtggcaaaagaatactggctacatcctttcttgtccattttcggcttgtcctgcaccgttcaaagtattttgtgtttgacatgtcagatgcagaatgccccttggcatattagttaattctatgagccaaatcctaaactagctcttgatgggaagaatagcatggttacattgccgatcaggcgtccaagcgtagtatatgtaccatgtgccatgctagatcctgggccatgctatcccgtatagaagagcatctgtccttccaggaagggatcgcccttgcgggtgcctgcacaccctaccatgtaataaactgtcgaattgcatggccaatgcatccttaggagagcgtctgtgtgccctgctgcaaggagcaaagcaaatacagaaataagtctccaaaatttcaccatcccattgttctcatctacaatactcgcaggtgggatgttatacccactttgcttcgtgcggaaaacagcttcaaaaagtcgaaaaatgtaagttaagagtaaagtaacaaggccaacataccacttttataaccgcccaaggtaggtcgatgcagtttttaaatgtgaaatcgtagtgtttgaaaagaaccgcttattcttcgacatcgaatcgggataagctagtaaccaaattgctttttcctgatggaagtgttgccttgagccaaacaaagaaaatgacagtaacattttcctccatgtaaatcgttggttcctgtacatgaataaaagcctagtcaacgagagctcaaaatgaattatctcaacaatgttgcttttgcagttcctcttggattgaatagcgcgaatctcgacatggtcagatgtatgttaccttagcaagattgcatatgttatatatatctgattatatctggcgatcgaacttttccttttccgatttactgcttctcgttgagtgagaaatgagctaggatttgtctctatcttccgataggccagttagaactcgcagcgattcgaaatgtctcgaggatggcctcgagctgatccgcgagagaaaagatggcaattgtgctgccgtgcatgcgtacaagcgcttggtaatcgaagcaagggtctaccatctttagtctcctcgcggagggagtttcaataatcgtaacagtcgtctctggagaagtgatctgaaatagacctacggccatctggcagattagatagaacttcccattcccctcaaagatccccctcccacatgtggatcaccatactttggtagcacagcatatttgaggttcatctactttgatacataatgaccagaactacatagaggtgtaatagattgaagccaaataaatatttaatgagacacagttgaatacttcgatattcagtcaaccagtgtgatatgacgtcatcttatctccgaggtcatccatgattgtggagagctgacaaattagaatctatgagcttcttataactacataagtactacttacttgcttccttaattattccagatgttctctcgttcactgaaagacttacctcgattatctcacttcgcgtccagatttcacccatattctactatgtcttcaaacattaccctatatacctggcccacgccgaatggcatcaaagcttccatcaccctcgaggagcttggtctagcttataaaactgaaggccttgatatctcctccaattcgaatccccaaaaggaagagtacaactacctctactacacaatacgacatgtcacataagctgatgaaagcccttgaacagatggttcctgaagatcaaccccaacggccgcatccccgccctactcgatggctcgcagcgcgtctttgagagcggggcaatcatgacatatctagtcgacaagtatgacaccgaccgcaagatcagttacgcccctggtacctcggagcacgtcgaacaaacatcctggttaatgttccagatgggtgggctcgggcctatgcaaggtgcgttcaaaatctcttgtacgtgtgtttcaggttctctctcacacccaataggacaagcgaaccatttccgtctcttcgccaatacgcgttccgattacgctatcaaccgttatatcaacgagacgaagcgcctcttctcggtcctcgaatcgcgtttgaaggaaagcccttacctcgcgggtgagaagtatactattgccgatattgcgagtttctcttgggttcgtggtgctcctgtttccttggagattgatctatctgaattccccgctttgaaaaagtgggtcgaggagattgataagcgtgctgctgttcaaaagggagtggatgttcctcattcgactaggactcctgagcagagagctgaatttttccggaattgccgggccaagattgatgccatgaccacttctgatcagcattgattgatggtagtatattgggtttctggtcacagtgccgaaaaacaatagtacaaaggaacaagtcaagctcgttgcaacaatatcataacattccttgcatctaggagtgatcctatgtcaaaggtctgaattatacatcaattcctcgagtaaccaaattctgaacaataaacaaagaggcaatagcaattttgaatagtcaaagctccccgggcctgtagcttctccaggtcttgaacccaacctgctcataccacccgtcgagcgcaacccagtctacaaagacaccttcaatgcctcgctgcttcatgttttcaatagcatgacagatcaatgccagtccaatgccatgcttgcggtgtgattcatcaattcctacggcaccaatgagccctgtgtttggaccacaggtttgggggaatgcccaagacttgttcaaagcatatgatggaccgagcatcagtgtccaaccaacctgctggccgtgagagtcgaatgctatcatcacactgtcgggatacttgtcgggatgtaaagcgacgtatgcctccacccagctcttgataaaattttagtatgaattccaacaaagtacaagtggagagaaacacaggagtcttacactgtccttagagaagttttttctttggccaaccaaacaggcctcgtaatcttcgggttttaatggcgcgaagcggaagcctcgctcccgagcacgagtgatatacttctctggcgactggaagttccgaacatcttggtacaaatcaaccgaccgggcactgggagggctgagtcggaaaccacggtgagtgaagaaatgttgcactgtttctggaaggtcctggggtatcccgggccaaaagcgggggaatgagctgcccagcttcacattattgaagccaaaggttgcccggaaatatgctcttgtttcgtctagcaaggcaattccaatgccttgatgttggtactttggcgacacggcaagaactgcgatatacacggtgtttggtgcactatgggcatttgtataagcaagacagaagcctactagctgcgatccaaaacgcgcgatgaaatggtgaccatgcgggcgtactatcagagaccgcaaactttcagcgggaataaggtaggtcgggagagcagcggcccagacttcgaccacctcatccagatctctttgcgcatcaaatggcattactaccgcagaggtctttgtcgaagcattaatccccagcggaagagcacctgtcgggactaatgctccaaacatgatatcggcagccacagaaaatgcctcgatggtcggctcgtatgtggtaatataggtcttcacactaggagcatcaaggaagtcataagggttgcaaacagcaatatgcaccaatgcatgaacacgctcagcgagttccaggcctaatgactcctggtatggcgactctcttgcattgaatgaagtgaaaatcaccacatcagcgacttcaagggttcgccattgctccgaagtcaaaccagtcgctccgtatctgagctccgcaatggaattgttgtgttgccgcaagacatcaagatatctgttagactgatataatcctggcctccccgttccttcgccgtcaaccgcaccaccgactgggatattatctccagggaagaggaagatgatgattgaagtctttgatagggggagaatgccatttttgtcacgaacgagtgtggtcgatcgagaatatatatccatagtcgtctcggcaattctattgttgggcgagttcaagtctgcgagattagattgttgaagagcgacatcccagttcaaaaacttgtccttcaccgtagcaacatggcgacaagcgtccgccagtcgtgactgctcgattctgccggactttattgcttcacaaactgtcttgatcgatgctacttgcacatcaaaggtatgacagatcatgatgctatcgctgccagcgcgcaacgctaggaccgagccttcttctgtaccgtatgtagagcggattccatccatctccaggcagtctgtgatgatcataccatcataggccatgtccttgcgcaaaatccccataacatccggagaaagtgttgcaggccgcgtgagatcgatacagggcagcgagatatgagcagtcatgacggtctcgatgccttcagcgacagcccgcctaaatggaatcaattcgcaacgctccagctgatcccttgttttgggaatcaccggtagtccataatgcgagtccacagctgtgtctccatgacctggaaaatgcttcacactagggacgatgttttgctcccgcaaaccccgcgcggccgcactcgcaaaccggcccacaaattcagggtcatcaccaaagctgcgtacaccaacaactgggtttaagggctccgagttgatatcgcacaccggtgcatagttcatgttaatcccgaagaaactcaaagtttcccccgtggctttccccgcactgtaggcgcactccgggtcatgcgtggcgccgagtgccatggcgcctggtacttgagcagcgattggcggagatatgcgagtgaccaacccattctcctgatcgattccgatcaataatggtcgctcatgtccagccaatctggcttcattctgtaaagccagtgtcaaggcctgaagaagattagtcacgcgtcaagatacttggaacctcggatatcgcacctggagctgttctgaattctcaaaattgcgcgagaagagaacgatgcctccaacgtggtagtcatgaatcaaaatcttgatttcgggacttggggtgcagccatagaaccccaccgcgaagagctgcgatcgtcagtgagattcacaaaacaggggtttcagagctcatatacctggccaacctgctttctaagatctgaagaaaccattctgggtttgttgattttatttggatggtctcatggattgcagatggtttaaacgggagtgacgttgaaaaggatcggagttgactcggtgtccacccgtgaacttgatgcaacattgcacctacacttgcgcttgaggatatttcagcttaacctcttagagtctagcgaaagccaattgcgattggaacatttgaatgtaacaacatctgatataaaagataaggcaagttcgatggatgcggggtaggtaacctccagggcttgataggagatatatatcttgcaagtgatatctcgtccaacttgaactaacacttgcacttccaaaatggctgaaattcatgaaaatggtaaaaaccccacgtcggttcaggtggccgccccacagccacattctaccttggaggagtatgaacagctctttggcgtcgacgaggacgcgtatgagcagccaaccaccactaggaaagaactatggtcctattatctctattacaatggcgataacggtgtcggtccgggatcgtacagtcaagctctgtatgtacaaatggcaacgctggaatttttcgactaatcccatgaagcttccagtgggccttgaacggtgccggacatcaacctggctcgaatccacctaaagcctgcaccgattcatcggcatgtgtagtgccgtgggcgggaggcactagatcagtatcttccgtggttcttattgccaatggcctttgcttcactttcatgacggtgatattcgtctggctgggaagtgctgcagactacggaacattcggccgatggcttcttctggcattgacggtggtctgctgggcactgcagtatggtatgatgtccatccgacatccaagccagtggccaacggcgatggcattgtacgttgtttcatacattgcctacggcgcgacgctagtattctatgctgctgtatttccccgtctggcacggtatactccgcatgtgcgcaaagcgagagaagaggatctcagagagggtaagatcaaccaggaagaatacgatacggttgaatcactggagagaaatcatatcaggtgagttgggaaactttgagctcctggccaagatgtcgctgacgatagtagcaacatttcaactgcacacagtaacattgggtacctattcacgctcgtgctcaatcttagcgtcctacttccactccaaaacaacactttctcgaataacctggccctctgtcttaccaactcatgtaagctttctgagcagtcaatctagtgtgggatttatctaacgttctacagattgggtcgttcttggcatctggtggtttattttccagcaaaaaaggccaggtccaaagataccaaaagggtcaagctacaccaccattggcttcaagcagatctggctggccattcgggaaattcggtctctcccacagacatttctgtactttttcgcctatttccttcttgccgatggcctaaacactactggtgggttcattccttctttgcttgctgcaacgagactctatagccccatgtggacaagggaattcactaatatgaattattaggtaccctcgtcagcatcatccaaaacgactccgtctcgttttctttcttgcagattacatatctcggcattactcaagcggcctgctcgatcacctcaacattcggcttttggtatatacaacagtacttcaaatttaagacgaagactatgttcttgttcacaaatttctttaccgttttgatccccttttggggcatgctaggactatggaccgatcgcatcgggtatcacaatagggtatgtatcaggccccaactgagagtctgcagctaacagccatggagtgggagttttacttctacaatgtcatctttgggcttttccaggctccatactatgcggtaggtggaactttgaatggtcttcaacacaattcctgctcccatagcttctaatatcgtgccagtacgctcaaacgatgatcagcgaactgatgccacgcggctacgataatatgtttttcgcactctttggaataaccaatcgcgctgtaagtcggatgtcttgaatgttatatttccttcgaatcactaaccttctagtcttcaataatcggtcccaatgtcatccaagccatcataaacaatacccacaacaactggatgggcttcccatttttgtttgcaatctgcgctggggcaatgatcgctatctgctttgtagacatcaaaaagggtcgtgaggactgtcgagaattcaccgaaaagcgcaagatagatcgtgtcgtggcggagagtggtctagatcccgcttatatcgcaaaggggaagcaatcagctcgtaacgaagatgtccccgaagtgcaaaacgagctcgcaagcacttcggtgagggagtgagcgtgtgtattttgcgaacatttgagttgttattcttcagctctcttttagtctctgttttgatatgtcacatgctatcattaagtcttacatagatgtcatgtctccaacgagatattctaaatcgactcttcatgtctcagccttttttgtttcctgctgtatctccttggtgctctcctcgaccttacgctggtccctcttttcgaccttgtcccgccattgatcgccgaaaacagtcgtgagccatacaccgaccccggatacaatcaaaaatagggcgctgatggtactaaaccaccccactcccatgctctctatcgccggaagaacaagtccagaccccagagcaccgaaaacgtaccgtgataggtagctaccggcaacgacctcagcactccggccgcttgactgcataacatccaggctgtaggtattgagactagggaagcagaacagctgcgccactccctggaagaacatcgcaagcacggggactggaattccaccaacagccttatcgaccgtccagccgtagatcaaaatacagccggggatgacgacacccaagaatatcagacaagatttaagtctgtcttcggggactcggacaccaccgcgcttgcgaatccatttcttcacagtgtggtctgcccaccttccacccatgagtgtgccaacaagataaccacagcctggagcgatgtaaaacagtcccgtctcgatagggctagtgaggtggaagcgtgggttgagtacatatcgaatcggagtcaacagagagtactggttccaaacgagagcgccggcagcgagacccgtgcagaagaggttggggtatttgaatagcatgatagcaacttggaggggagagatccggtgccaaaggtatttggctttttgccatgtcgtcttgtcggctatgtcgcctttagtcaaattcgggtaggtttcggggaaaaagaagaagacaagaagcgtgccgcagcctccaagagcagcctggagccagaagatcgctcgccatgagcgaaaggtgacaatcacgccctatattagtagatcagcggattgtctcggcgccggggttataagatagacatacgccaatgaatggtccaaaggctggcccaaccagggttcctgacaaaaaccaccccaacgctgttgcccgcgctcgaggttcgtatacatcacctaacgccgagctcccaactaccaagaaagatgttccttggaatgcagtcaagacgcggaaaatataatacgctgggaggttgggtgctagtgccgtgccgatgctaaacgcgaaaaataagaatgcgctcacaaggaaaacctagtcccaattagcatgttacttcaacatgaacatatgctcgttactcaccggacgtcgcccccaaacctgactaaagggcccccaaaagggagccgcaatgcccatgaatgccatatataacgcattgctcgcgtttatcacacttcctgtggtgttataggtcttggcaacttcaggtataccagctaagatagaggtagaagagataggtgccaggaaagagcagaaggaaaggatcccaacgataatgaccttgcgtgctggtgaaaagcgtagatattgctctgcgttgacctcctggaagtcatcgttgacaaccatatcatgatgtgaaacatggctttgtacgtgatcaagactattcacagctccttctcgctgtgagcgtcgggattgggatctctgaatttcggtttcattcgcccaggattgagaccgcctgtcctcgctggaagctttcgaggtagttggagacatggcaggaaccttttagcaagagcaagtgcgtgctagcttgtggtaaatcagatccgagtctatcgcagtgcagatgcaagatatgaaaaagaaatatttgcaatcgttcttaaattcggcttctttccgagatcatgctcgtcgggtagatccgtgaacgcagaacgtcttcaattgaaatagtaaaaagtgaagagatgaaagtgaatgaattgagtctaagcaagtcaacagcaacgagatatatcgcagacttaaagcgtgagtcagagaaatttgaatggctcttttccctatcatctggaaggatcggcgggttgcttccgatgtagcatttctagaggccagcggcccccgaacagagggcttgctatcatctctgggggtccattcttcccagtttagaggcgatagacgaatgtgattcggggagaagaccggcgggtttgttgagtagggcagaggggcggaaaagaatccgggggctacgggtgccggagatacggttaatccgtacggagtactagttgggcatggaagacgaagaaaaacacctaactatactataatgtatgttgtaaatcttttggggatcttataagctaatagatatttactagcttttttcaaattcaggctctcattcctcattcattttgttacctagtactgacccactacggctagtgagatgggagtctttcacatgtcgaacagatgctagtatataactacctacacgtaactaactacgtaattataaaataagtagttaactagttgactatttagttagttaactattgatcatttaataaaaaaactctttcaaaaggagtatctggaagaatgcctattctggtgttgtggctgttcagcccctgcccatgacgttatccccttctgaccgccaatgaccgactttgtccctctacctacctcccccacgctttttgcttttgtcctggagatttcgagcccaatttaatagcttgcgaattcattcttattccaaaatatgtctcctcagagtcaggtccctgctaatagcaagggctcatggacaagtttcctaaaggtatacaggctcattttgttcgagtatacctttgctaacaaatttccagtcgattgcctcctttaatggcgatctatcctcgctgaccgctcctcccttcatcctgtctactacctctctcaccgagtattccgcctactgggccgaacaccccgccctcttcgtggcaccagctaaggaggccgatcccgcgaagcgtgctctgctggttctcaagtggttcctcagcacactgcgccagcaatactgcagccgtagtgagaagctcggtagtgagaagaagcctttgaacccgttcctgggagagctgtttatcggcaaatgggtgggtgacgcggaagtaggggagactaccttgatcagtgaacaagtcaggtacgcgagaccacttttgtataaaactacaacccactgattgaatactagccaccatcctccggccacagcctacgctatctgcaacgaggcaaacggtgtcgaggtgagtggataaagattgtaccaagtcattgagatgttaataactgacagtacaaccacagctgcaaggatataacgcgcagaaggcctctttttctagtaccatcctcgtgaagcagattggccatgcgctgtacactctcaccaagcccggatccgacgataaggagcaatacctgatcacactacccaacctacacatcgaatcgctgatctacggctcgcccttcgtcgaattggagaagtcaaccaagattgtcagcagcactggctatgtcgctaagatcgactattctggtaagggctggctgagcggcaagaagaataccttcagcgcaagcttgttcaaggaaagcgagggcgagaagaagcctctttacactgtagagggccagtggtcggataagttcattatcaaggacgcccacaccaaagacgtcgtcgacacctggagttccaaggaggaccccgtcactccgctcaccctggctcccctcgagcatcaagatctgtacgagagccgacgtgcctggagcgaggtggccgccaacatccagaagggcgacatggatgccgtatctgggaacaagtcgcgcattgagaccgctcagcgcgaacagcgccgcctcgagaaggaggcaggccgcgagtgggagcgccgtttcttcagccgtattgaggagagtgccgaggacccccaaatccagcatcttgctaaagccatcgatcttcctttcgaggccgacaagactggcggtatctggcgcttcgatgctcagaaggctgctggcgctcagccgccttaccacaagattggcggcgagggtctcggtctcaccgagtagactattgctgggattggacaattctctgtcgccctctgaatttttcttgggacctagcttgcacaacatagatttgacgtttttggattcctattctgcaccgtgtcattttgcatttcgattgtatatagttcccggtccaggttgaagttgaagccgcgcacttgcttataagcttggacggctcaacttttccatataatgatatggtatcttgaaataattgatagtttacatctttgaacttggtgaaagttcatgtcgaggctgaatgctgcgtcaatgacgaacaactagtacctccgtgactacgagaaagctacaatgtacaatactagaacagtctctatatataggcgccacactggacagtacaggacatacataattcatgacacttttagcccagaacgcaactgggcattggatctacctctaccagacccgttcagccatacatcataatcatcgaccgatattgcacatggtgagggacaaagacagaacaacagaagggagaagtaggttaaaaaaaaaaaaactggaaaaccgtccgcggaaacaattgacacaccgtacccgaatagacaccgactaggttatagcgagaaaacaaaaaagaaaaacagagaaacctagagaggaattggtgaatttaatacagagaccgcatcagatgggagcagtggtagcaaagaaaagcaagacggctgagaggaatggcaaggaaacgagaaagaaaacaaataaacatcaagaagacaatcccccaaagtaaagaaaaccagccaagctcccccaaaaaaagagaagtagagattacacagatgttgaggagagaaagatgaaaagaaatcgtctgagttctgtctgtccttttgacaagacattagaggtttctgtccctgtaaagtggacaaagaaccaaaccccttttcaaatcatccgcaaatgcaacgccatatgtgtttggtgggtcattatgtctccccttcgtttctttttgtctttttagtggccgtagttgccaccccagccgccacggccagagttcgcatagtagttaccgaagcctgccccgtagttgttaccatagccagaggcctggtgagtctgggtggccgcaccctggtgaccgagtccaccgagtccaccgtactgcgggtttagctgagggtagctaccgaaggactgctgaccctgctgaccctggagcgggggaagaccagtctgtgcctggggctgacctgggacgctgttggtagcagatcccggacggttctgggcgagagaggggctaggaccaccggccttgggagcctcaaagcctttggtctcgtcggtggcaacggggggctgtccggcgatgggaggatttgggccgaagctgccctgggaacggctgaaaacatccgacatcccagtaccaaaggcattggcgccagtagcagactggttatcagactgctgggcggagccagtacggccgtagacagagtcgcggctgggcatggcctggctgaagctaccggtgtttgcgggggaagacgattgctggtcataagagaaagccccgtggggttggccgtacatgccacccttaccggcatagggaccatactggctaccatagccgtattgctggttatgctgctgttgctgctgcatgtagtgatcctcataccggcgagcatcatcgtacctcgggcggttaccgccaccgtattgctgctgctgctgttgctgctgctggcccatctggttcatgtaagaagcgtagtgggggttgttgtagtagttaggatattggtagccataggcgtgctgctgcgcactttggccaggcatatgctgagcagtgggagtctgctgggttgcaccgggaatggtgggattgggagtgttgtggccgctgttagtggcgtcaacagggccgtagcggttaggaggctgcgtggtggtaatctgagcctgggcctcagcacccgagacaccaaacccagctccggcgcgaggaccggcgggggcgtcctgggtctggccgtaagagccataggaagcgtagtaggggaaacgctgctgctcagcagcgtagaaaggagagtactcgctgccggtggtggcagtaggttgagcaggagcctggttggcgaatggctctgggatctgcggctgcggctggctcacctgttgggtgaagggatcgaatggcttctgctggggctcagagtaacgagcgaagtcggtaaaagagtcggcggaagcaccctgggggaccggaggcaaaccaggggcaggacgcccaacggcaccagactccattgagtggggtgcctgagtcgcgggtggaagagaggcacggggggcaacgggggagtgctgcgggggctgagcgcgggtctcggcctcctcgcggttttcatcgatgtcaatagcgtcaccgttcagtcccatgctaccgaattgaacagcggcacggtctactgcgtgattgccgggcataaccacagcctgctgctgttccatcacacggcgttgaaggcctggggtacgtccctgtttggtagcgctgggagggtatgcagacgaggggaagcgggagggagtaggggcagctgcggccacagctgcgggatcaataccactgccaatggtgcttgcggcggtggcggtaggagcgggggcggatgcatcggggatttgttcgaggttcgtctcagtcaagtcgtcctgaggagggttaacggcggcggtcggaatggcggggatcacgggatgggtgggcttggcgacgggtgtcttctgtgaggtagcgggcgcagacacaggtgcgggagcgggggcggggggagatggctcggcgacaggctcggtgggcttctcggtgacgggaacaggaggagcggcttcgggcttcttttgcaccggaggagcgggtggtttggcaaaaagactcgcccaccccttctttgtgccctcagggatcacactgctcttaggctcgggcaagtccaattcgccttcagttgtgggctctgcataagtctcctctgccttaggcgtatcccactcggatgtgatagcaataatagcagaaggcgccggagtctctacagcagtggatactgcgcgagatccatttgtagtcgctcctgcacggcctccacgaccgccacggcctcggtctgcgcgaacacgtccacgaccctctattccaccgcgaccacgggttccacgagcagaagctgcagtcgtctcggtcgaggcactgggggcctccttgggcttaggacgagtccggtctgtggtcttcttcttgacctcaccccactgagatacattacctgtaaagccagtcagtcacggtcttcgaatcacaaggttcgattgatttcgagtcggggagattggggttgacgggaactcgaccttcactgatgcgctcaattgcctccaagagctcgccgttcgagtcttccagtgcaaataccagatcttcgtccttccagtctgggaacatttccctaagagttggcagagtgtcggagtacttcttcttcatctgtccaatttcaccctcttcaaaggatgagatgtctgaattatcatttgcagatctgtttccaccacgaccacctctggagctgaagccgccacggccaccacgggcggatactctaccccgcgaggcggaggaccggttctgaatatcggacatgttgattgatgaagatgtgtgagatggagaagtattgaggaaggaggtcacgattcgcagggaaaggctattgaaatggagcaccctcgcagaagaggaacagcaccagaaccacaggcacaagggccagaagagacaaaagaaagaggtaaaatcaaagagattaattgggggagagggagaatgcgttaggagatgacaagattgaagaaaggatcaaaagctaacgggatctgagttgcttcccttcaagtcttggcgttgcctggcttttagcgagtggcgcttattggatgctgggggggatttacagtaacaaagggatctttactggtttctttacattttgaacggaatctgattccgaataattatattggaagacatttatagatctagataattcgttgcattccattgaccgaatggaaataatttttgaaaattgtttcgtgtcagtgtggttggtttcttctactcgtcattcacctttttttcgctttgggcgacagaaggctagtttcaccgccctcgtcgatcctcctctttacctcgatgcacatcatccctcagaaccttgaaactcttaaaccatcatgaagggtacatccatttttcagttcaagtcctggcctaaaatccatcaacccttacctcgtactccacgagagtctcagcaactgttaaatgccctcacgtcttcttttcgtcgccaactagatggggcttatcccgcgtcaggcaacaaccatggccggcccctctccaaccctgaatcatcagcgcatgcaaccgatcagcatttgcagaatatcctcgacaatccgcttttccgtattactccgactagacccatctcacgagaacccaccacattgcaaagcattgagggccagcgtcgactagccgaagagcccatggccgtatttgatcaaatggctgcagctggctcagtcactaccctcacaatcaatgattgtctgaagtctcaacttctactttccaggtccccggccgatatgaatacatctcgggttgcatcgaggatcgttgattggtattgggcatcagacggcacatcgaggcaaatgcttctgcgtttgcggtcagtcactacgtcgttgaccaagttcatggtggcagagggattacacagtactgttatgaagtggttgcagatgctcatgagccaggacctaggtagtcagaatggccggatgactgaagggctcgcgcggcagacgtttaatcatctccttgttgactttatagatgcagaattctgcttcggaaatggcttcaactcagcgatggcacattatctgagtgtatgccagatgcatttccaaagtacttcttcccataagtcaaggaagccgatgctcctggctgcaggcgcccacctgagccgtctggccatggagcataaaccatcgggggagcaggtatcaacactagtttatgatcagttcagagatacggtttctgtgctgtctcctcggtcattactgctcgcatctgtggctgtctgccacccaacagatcctgatccacgcccgttcctccaatttgtggagaacctctcaccaagcaaatttcaggcctggaatgaaactaggcgtgatgctttctttgagattggttcagaggctctccgtgtcctcgttgaccgaaagaggttccgtgatatctcacggctagagcaacatatttcagaactgctaccggaacagccagcaactccagtcgctgagaagtcacacacatcgtctgaggaggaacatatcgcccgtctaaactggagctttacatgatctgctggtctcaaaacctatcgaacaatcactctactctcgcacaaagctaggtttcttgaaaaacattcaagccaccaacactcaggagacacacatatctctctatctttcaaccacaaaagaggtcaacttcagtgatgtcgtcacactgcaactcccctccgcatgtctgtgtactattacacaattgaattctttcagcatggatgtttgacgaaccttcattttccaaatcatcacgcaaaggaaatacactctcgcgactccactccgagtttgagcctcatattcttggcggtcgtacatacattgcttgccaaatcgtccgagagatttgagtcaccaggcagacttggctgaaccagtattttagaggtgtgtgatctgagatgcacctgaatactatcaattatctcaaaaatgcctcttcgttgtactaaatatacgaaatatcgaccttcctgtgatatatatataagccattgtcaatagtggctcagccggtttttagacaagctgtttgggctcaatgaagagcataacctaaacatccatacatcatctcctagctaatgataagatttacagcctttgtggtcgagtactaacctcgaacaaacccgtgctagtcacagtacgtcttgtggataacattgcgtggcaattgtaattctgcagctggtgaggctgtgcgacagaatgccgtggagagttggagggctggagcggcgaatcagccgagggctctccagtgctctaaatacgtcaccgcgcgacctcacctaacgatccccccaaattgatcgactcctctgtggttttttttctccttgtacaagctcacctgagcaagatttacagtcgcattgcttttgcgaatactctcccactcaatctttgccaacttataacccgctgtcgcggcatttgacatcaccgatctacaatggccgaaggagcccgcaatgcagattcaggtacgtggtttccatgcactactgctgaatccgaggagtaattggtctaagcagcccaattatttcctggaaatatggttgcaggacagtctttctttgtttagttaacgcccaggtgtaactatgccatatgctgactaagggatataatagatcgggacactgcccagctagtcaaagaacactcaggtgcattccagaacagagtaaacacaactcaaacggatagcccgcctattcctgaaacagcaaagcccgatataggtaccgaccagttaaaggcagacgccgggctagagacacccgagcccgctccagaaactgagccatccgtgacagagcccgcaggatctgctctcggcaatattcctattgcccatgagtcgcaggttccagtaggacccacaaatgaaacagtgccgggcgaaaagcgtggcattgattcagctctggcggaagatgagcaacgaaagcctgaaccgtcggatgggcctgataccaagaaactgaagacagacgaagatcatgtcactggttctaatggtaccgccgctgctgcttccaatccagacaacaaagaacagaagaaggctggtcggtccaagaaggagaagatcaaggatgctgtgaacaagattgtcccaggagatggcgttggtagccggactcgcagccggaccaagggtgcttgaataaaccgaggtcactatatttacagattcgcgagtgacatccatgtcatcatatttgttccgactttgaatcatgactattcatgttcggcacttcctcattggtgtcactgtacacgtgctgcaataagatgaatattctttcctgaccgaaatttgggcggggaagttttcaaattcaaaaaccacagaagttctacgcaatatcttcttgatcatgtatgacgttttaagacaagcaactgtttcactccgtagtatggttgtagacatatgcgctgccttacaacttccgccctatcacttttactctctaatttgtcccaatgtttgtcccaatgtcaaaattcttcctggagtacaagttatattttcaaataatttcgaacgtttccctaaataacgttgaatccctaaaccctcccgggggtctctttcggaggtttgagttggtggccgataatcgggactgagtcatttctcggatcggaataactaaccctttctatccccgcttattactggaggggaaagtctgtgtcattattggtgatagagcattgatatttatttgattactttttccctttcatcatattcaattctctactttcaaaatggctggacaaaagatttggctgcgtgctgagaccaagcctgctgaggcccggtctgcctgtgagtagtctcagcccacctacaatggcggggaggcaattggctaatataccatccagtgaccccaaccacctgcaaggcattgattgatgctggatatgatgtgactgtcgagcggtcaactcagcgcatctttgacggtacgtccaatttcccatgtcccccatactcccaccatcccttgctattggactcaatgactgattccgctctatagatgaggagttctccaaggtatgattcactcagtaatagctcgaactcgccctaaatatcatcaattgttataggtcggcgcgcctttggttgaggaaggatcctgggttcaggatgcgcctaaggatgccatcattctgggtctcaaggagctgccggaggatgatttccctctggagcacgtccacgtcactttcgcacattgcttcaagcagcagggtggctgggagaatgtccttagccgttggtctcgcggcaagggcacattgcttgacctggaattcttgactgatgattccggacgccgagttgctggtaagactcttgtcccaaagtgttcttgtcttgactcaattgactaactcttgtttaatagccttcgggtggtccgcaggttacgcaggtacctatacttgaactccgtttcctgatacaatcaatactaagcgtggaacaggatctgctttggctgtgaagaactgggcttggcaattgacacaccccaacgaggccttgcctggcgaggttcactatgccaaccaagaccttctggtcgagtctgttaaggaggcgctcgaggccggcaagaaggtcgctggcaaagcacctaagatccttgtcatcggagctgtgagtcttgcacagatgcacagaaagcgatacacatattaacaatgctgtagctcggacgttgtggcagcggtgccgtgcagctggccaaggatgtcggtatccccgactccaacatcattgagtgggacatggcagagactgcgcgaggtgagtcaatgactattcaacatcttgaaatctggtctaagctcacaaattaatgtccacaggtggtcctttcaaggaaatctcacatgaagcggatatcttcgtgaactgcatctacctctcggccaagattccaggtaatattttacatacatccactcttcccgactcaattggctaatatccttttttcccattagccttcgtggacttggagtctctctctgcccccaaccgaaccctgtctgttatctgcgacgtcagcgccgacacgtaagttatcaaatccgaaactatgcaagcgagcgcacagctaatcctcagaagctccaaccctttgaaccccattcctttgtacaacattacgaccactttcgataagccgacagttcccgtctccggtctggaggctggaggtctccctctcagcgttatcagcattgatcacctcccgtccctgcttccgcgtgagagctctgagatgttcagcgaggctctcctgcctagccttcttacgctcaatgaccgggccaacgctcgggtctggaagcaggctgagcagctcttccatgagaaggttgctaccctgcccaagtcgcttcaggtctaaacttgttgcgctggtaggtgtcgaataaatttacatgattgggtgcatcggatataaatacttacagataaggaatgctacaaaagttgtaagttcacacatgacagatgctgaagatattatccatcgttcattgttccgtcctataaggcagtagctctgcagtagctctatcaatgtgacaagctatggagtcaacttaaaaatggctattttaaatacttatcttattgttttccgggccaatcatctcctgcgttctcaaccgaatcgcttcgtggcggagatgacttgtctaaaagtttatatttcttctaagaggcataagccccgtatttccgatagttagagaggcattctgaaatccctgtcattccttgtcctccaggcaagacatggctttaccccagactacatggaaccgcggtcatcctcattatgtgcggggatgtgtgtaagacggatatccggagaatccgtccgtggggtctaagttctaacccacagaattgcctcattggatgaaatgagagcctcgcgcgaaaacgaagagaggaatgtcctcatgtccttcatcgttgaatcgtgacgatcgcggagtttgccccgtttgactgtggctaacctgatattggactccgggcgtggttctttctccgcataacgctccactctcaccctttctcccctcttccccgaacttattcgattctgccctcaaaattgatctgtcagcctttcaacctcggaagaccctgacccacattggaattctcttgtgatcaggtctcttaggacattcagcgctcttatctaactacatccgggctaattcgaggatggggtaatgagacgtctgcctgcttcgacacctacacgaaccgccgaacctctttccctctataccgcattgcttgatgcaagaaaagccgacaacagtcgccgcctatgcggccggggcatcgctcgctgccgttgctctgttctacgtcttcgggccgaattacacaattgacggagatgagtcaaacgacagcaatcgcaagaagagcatcgtgggcctgtctaatctggccaatgactgctttatcaattcggtgctgcaggcattagccgggctgggggacctgcgggtctacctgatccacgagttgcaccggcgccaactggacggaccggaaatataccatacactgcccagcgaggatgaggtttcgcggacgcgggcgcggtcggacaagttgcgggagttgcaacagggaataaccacacgagcattgaaggagatgctggaccgattgaacgagcggccgatttataagaaaacaatctcggcccgtgatttcatccaggctctggaatacgcgttccgcacgcgcatcagccgcaatcagcaggacgcgcaagaattcttgcagatcgttcttgagcgactctgtgatgagtaccatgctggtgcacgcgcacgtcaacgagcactgggtgccattggtgcagctgcttccagcaccgcaggcgaagagggcagcccacaggaaagctcgtccgaggtggaggtgcgcatcgatgatggatcagccaatggactgcctgccatcatcgacacgaaactcaggaaaattgaccaggagtctgggttcccgttcgaaggcaaaatggagtcgcagatcgagtgccagttctgccattaccagtacaagccaaaccagacggctttcgtcaacctgacattacaagtgccacaaaagagctcgactacgctaaactcatgcttcgacggccttctcaagactgaatatattgaggatttccgctgcgaccgatgccgcctgcagcatgcggtggatgccaagaccaccgagctagcccgcgcccgaacacagggtgatcgagatcggttggtccaggagatttcgcgcctccgggaggctctggagatggaccctgaggctgagttggagggtatcgtattccctccctcagagaccgcccctaagcgcaggatcgcgcggcatatgcgcatcacagcgttcccaaaagttattgccatccacttgtcgcgatcgatttttgatcagagcagctcaagcaagaacgcggccaaggtctcgttcccggagcggctccccttaggaggcatattgagccagaaatggtacaaactgcttgcgattgtctgccacaaaggcagccaccatagcgggcactacgagtccttccgacggaatcatatctacccgcctttttcaacacctgaggtctttagctcctatgcacagagtcgcactgccagtcagaacccctccgcgacggccagtcctcggatagtaccacggggtagccccgatgccgacggcgacggaagcgtttcaggagcaggctcgtcaacgtcgctatctggaggatccgcgactcaactcacccctcctcaaccacggcctacaacctctggctcacgacgttctttccagagcaactcccgttcctccaaacagacgttgtccccgacctcggacagtaacagtccaacgacagatcagggtcactggagtccgtccgccccgcgtccctctcacagcataccccgctcttcccaggataaccccactggggtcagctcgcgacttcggcgccgtcgcaaaccgaatgatcgctggtggcgcatctccgacgaaaagatcaaggaatgtaagacctcggatgtgctgggcatgcagaaggaggtttacctcttgttctacgaaatggagaagcctgacgcgagcgctggcaagggactttgattgtcttcttttcttttttttagattccagtacatacatactcccatacttctgtacagatggggtggatcgaattaaaaggggatttgaatagagatatgtacagaatcagaccaagacatgtaggtagtggaaatagttagttccgataaacggcatgacctcgggatatagatgatgtcaccagactaagcttaactagttactccgtacccctctagtgttcttattctacattctacattattctaaatctcagatgaattaagaaaccagatatgttgtccaatgagattaactagaactcggaaccagattgaatcttgaaacatgattttagttagcatacacatgtacaaatagtaataggaaatggaaatgcagcgaatggcctcgaactcctcggccccgccacgaacaaaatacggattcttcgggcacttctggggatctgggtgagctattgtatagctgggatagctattgtagttgtaatagctgtagcaagggtttatgactgtggttatcaacaactttgaagcttaagcccatggatataggaacaatggcctcatcactcccgttctaagctcttgatagctcccgatccctcgacaacatcgggctatcacggggaaggtcgggaacaccagcgcaagagcccataaagtatattatatcatctgcccatctcttcttttccctctttttcctgaaatcacactgacctcactccagttccactaaatctccaccaccggtgagtctgccctgtctcccttcaccgatgacgcttgcccctccatcttttgcccctccttcttatttaactctgcccgctttcagctctcggtaagagcttggtttcactacatttaacgactttatcattggatatctgaccttctttccttctttcctccttcagatttctacgaatctttgtacaaacttcataatgggtgtccttgagcaacttaaccgcaagtccggcgtcattgtcggcgacgatgtcctccgtctcttcgagtacgctaagcagaagggcttcgccattcccgctatcgtgagtcccgaatgtgttctcctgaggaaccttgcactaattcaatctagaacgtcacctcctcctctactgttgtcgcttccctcgaggctgctcgtgacgacaaatgccctgttattctgcagatctcccagggtggtgctgcttacttcgccggtaagggtgtgagcaacgagggccagaaggcctccattgctggtgccgttgccgctgcccactacatccgtagcgtggcccccgcctacggcatccctgtcatccttcacaccgatcactgcgccaagaagctcctcccttggctcgatggcatgctcgatgccgatgaggcttacttcaagctgcacaacgagcccctcttctcctcccacatgattgatctctctgaggagcccgtcgactacaacattaacaccaccgccgcctaccttaagcgcgttgcccccatgaagcagtggctcgagatggtaagtagacttgagaaacgagggacaacattgacataatgctaaccacttttacaggagatcggtatcaccggtggtgaggaggacggtgttaacaacgaggatgttgacaacaactctctctacacccagcccgaggacatcctggccatccagaatactctcgctgccatcagcccctacttctccattgccgctggcttcggtaacgttcacggtgtctacaagcccggtaacgttaagctccaccccgagcttctctccaagcaccagaagtacgtcaaggagcagaccggttcttcctccgacaagcccgtcttcttcgtcttccacggcggctctggctcctccaaggaggagttcaaggaggccatcagctacggtgtcgtcaaggtcaacgtcgacactgacatgcagtacgcctacctgaccggtgtccgtgacttcgtcctcaacaacaaggactacctcatgtcgcaagtcggtaaccccgagggcgctgataagcccaacaagaagttcttcgatccccgcgtctgggttcgcgagggtgagaagaccatgagcaagcgtgtcaaggaggcccttgaggacttcaacactgctggccagctgtaaatgttgacctctgtgtgatgtcgcataaatgattcccttttttacctctttctattaccctcatattatcctctcttcatgcggccgaaaaagcgttgggcgtcctggggatgtgggcgtccaggttgtatgtagcgttgtattctgacacgctgtaatgaatgttcatattacggtttttatgatcgctctggaatacaaactgtaatgttctgcttgataattgtattccaagaccagccccgttgtaggtaccagccagaccgtaagtatacttcgatctatccatcatcaactccattatcgaattacacatgtaggttgttacattatatttcgtcatcagtacaataactatgtacttggtgtttttcttgtcctagttattgcattatatctcagtcctgataatccaagctctcggacacgaagtggtttactcgacgagcaaacgggcttctcacctctcatgtctgctacttgcttctgtcttattattgaagtgattgactaacaatctaattttctcatacctctcatacctcatctctcaaatgaacctccatcaatccccttctccactatgaaactcatcttgtcccaccatcatcataccagcattaccatgccatctacgcaattaacccaagtgccacaatcggtacatacaaccaaatccaagcatagcccttcctactaactaagctattactgaaccaggtcctagatctcagtggagatctagaagaactggtatacaccaaagcagcaattggaatctacgaccgaaccatgctggcaatcgtcaacccgacaacaacaccgatggagctcaatctccaccacgggtcctggctacaggccaagtcgaaagtggcatcgctccaccggagcatcgtggcggatttcaatcggctgccgcgtcaaatgaaacgtactttcgtgagggccaatcgcttgactttgtcggagcatgggtttcggccatctgcagataacttggagatcacccgtcctggtagtaggagggctatcgctttgctttaaaatggggagctgggttacatactagcattggcatgttggtggaaagaggattggctgtcaattgttgctaactggaatgttgtgctagagattcatcagcttgcacctctattcctgcccctttctaatgctccattttgactccatacaccaaaacatttggtatggacctcagctgctacaccattcatcgccatcccatactcagttagcaacgttagatgattccacactcaacaacatactatttcccatttcagcgcacaagaatgctactagggcaagttgttctgctatagagattgtgctctggctctatgtctatggagggaggtgatagctgtccatatctcttttgatttgcgttgggatgctcgaatgctttcactgctgatggatggctcaaagatgcattcaaaagcaaattgatactcagaattaagatttcacaaacacattgcagcggttcctgtactatgtaggttcttttgattcacctatcaatgtattgtaatcctgtacaaattatctacgcgaaaagtgtgatgtagcaatagtgaggaaattgactggtagagcaatggttgatggccatatttctgctgtagtgaggatgaccgttcaaatctgtcgagatgctcgtgtatgaaagggatggtggactgaaaagacaattcactatgtaaggctaacatctatctacaggaactactgtcttcttctaacagagcagacccaaaaagggataatggataaaacactcagttgatgacatggccaagtaacacactataaatcaaagcagtgatgatcagatctagcattgatgaatttacaagaataacatgatagcgtttcagtcgtaacggtgtgagtctcagatagtgacaactcaatctatggtccggacaagattccatgcaacatcttacgcgctcagttccgagacggcagcatatatgagttcctgacataagatatctttttgaaagagcacccaacccaatcctcaaatcagagcacagcaatactatcaacaagcgtgtttacgagtccactcccgtgcaatctcctcatagcgtgaccggtcgtttttgtattgctccgcgatccgcccctcgacagcgtcgtcaggcatcggctcagatagtagctgccgggcgaattgaagaactgcggcgatcttcgagctgggtttccattcgtcggctcggagcatgcctaggcacatgcttcctttttcgtcgtttgttacgttcgggtggtatattctcgttgcgaaggagaccgtcggcggcttgaaggggtattccgtgggtagggagagcttgactaggaatttgccattctgtattgtttgccgagaggttagaaacactgtttattggacatgaactgtgaggttcgagttcggggactcttaatggagaccttggagatgatgggggtaaatggggctagactatggtttgacttacctgatatggtgagccttcaggcccttccatgatgaccttccacccgtacacgttcgactcatcggccagttcaaccctgatcccttccgggggggattcggtgagctcagtcagctcctatgaaggtagtcagcacactggtagatgagatgatcatgtggaaatataggtacttgccttggatatgcgcttgacgctgcccattatggtgttcggttgtggatttggcggggtgataaacaggagcggggaggttgaagaatgcagggaaacgcctaagcgcaagacgcgtttaaatgttgaagcaacaaataaatagagatctactaaataatatggaaaagatgctatgtgcaaaaagatgcttaaaggacaaagggggattttacggtgaagctagaagctccaagtggggtgcgcggcaaaagacgtcagtggagaagtttgatatgtcggccgctctatcgatgtccagaatagtaaacactataattgaacacccattgtctattgataactccctgccgtaacatttgatgcatttgattacattcttggcattatccaatgtatattttcgcccattactctctctgaatcatcaccatcagtcccattagtcccagcatgactgtcttgagccaagggtgctcgctaagcatgatagtaacgtatccgaccataggtacgtagccacgaacactgccgacaatatcatcggtccggtgaagataatcctggcctaaccttgtcagtaaccttcagagatggccccgaatcttgtatcgcttaccatcagcatacagctcagtatcgtctgccaaattgttatcaccctaacgatctgttagcaatttcctaggccattcgaattgtcgagtcatttaccttggtgagaagcatatgcgagttaggctttgtgtccctagaacttcgttagcataaggaagtagccacaagaaaaattgccgggcaatgatcgaggacatacactgtgatttctttcaccttctttgcgctcgcccgtccttctacctcagggaaagtgcgaacaaccctgtggacaatcggaatagactttccccgaacattataaacgagaacttctccgatctccgcccttgtgtttcggttccagagaaagagcaagtccccacgctgaaatgcgggctccattgatcctgtggaaagggaatgtgagctgtgttcagaccgccataaaaatagctttatttaccggacagaaccacaactattggagaacttgatgcggacacaactgaaaggcctttccacagcatgaaagccgtggaaagaacaagcgcaaagttcagcacttgtgcaattgattgccgagcatttgtgatgctggatgagagggaggatagcatggtgggcggttcgcggtcaacggagatgggagggttagggtaggtcgctctaatagtgactgttcttagtcagaaacggtagggagtttatttcctttgttttcctcatggtagatgaagacggtacctattgtgttcagctaactaagctggttgggtcgtgttttgatagagctagagggtgcggagatgtggcctcgtcggagatcgccttggcgcagatccactggccttccgccttgcaggtatgtataaccatcgtgtaaattgtacggagtaccacacctgagttcatacaatggatttcagctggtccagaaatagttaatattgtaccgaaatgaagcaatattgttagtaagaaatggctgcttgctatatccgtttcaggctctatctaggcaactctgtaactatatataactaatcatattcgagatatacatgtttttcgcggtctatatccttaatctcttgtccactcaaagacagtatttgttatgttaaatctaggcaatgatatacaaatcctaggctcttgcagatcatacaagaccctccggacatcctcggacatcatcggtcagtgcttgtttcattgtctgagatatggccacagctcgtttgatattccttatagaaaataatacatagcttgacatcataagcagattctttttgtctatttttctctgatttttccaagagtttcaccttttgggctgcgcgaaaagtcactatgaagaatgttgaagataggcatccctagaaatcaagtcactagactatgtctcatggctgaaattgtggtcattctccgcattatacaatggccaattacatacatggtagtgatgtttgaggtatagacttgatttcaaacatgtagcctgatctacctaccatgtcttagctaacctatcagcagatggaaatctggtagattataggtaaaattcctggagatattttaggtgattgacgcgcgcgtatctatcgccgactgatctctaaagaccccattgtgcatattgcaaggggtttcattcttcggggcaaggtttgcataaaaatgtccgagcagaagcattttcaagatgataaaagctcgaatcccacttttagattagctttcacacaggactgatgtactgcaaacaagggtgaccaagtcacacattattcattatcatttctatggtttgcttcaatatgcagtctatctcctcagaatcgactttatcgacaggcgagcccaaagcttcagccattgagctcctgcatgaccattatcttgagcttacccccgatgggaaatatgtgcgatggttgcgagatcacccaaggcatcctcgaaattggtctagcctacgaaagacttacgatattgtccttatctgtctcttggatctatttatgtatgaccagactaaatctcaatgttattttgtcaataagctaacaatactactagaacagcatccagtaccgcaggtgtgagtccataaagctatctatgacctaccttattgccgagctaaccgtaatattttctagtcagcagctgccgcagaagccaaacatgaataccatatcagcgaaacgctttcgatctttatatttgtcacaatgtgagatcagttggtcttagtctactttgcgtacctgacattaagcagatttcttctcggccaggtggtaggcaccatcttatttcccccgtggtcggagacatttgggcgcaaaaacatgtatattgtgagcagtggtctcagcgccatttgctgtatgataatcggactcgtccgttcaatgccggtcattatcatcatgcgcatcgtcgccgggcttctttccgcgatcccttataccatcatcggcggcagcatcgaggacatgttcaactcgcatgctcgaatatggaccatgtactattggacaattgcttcaaatattgggctcattcttggacccattatgagcagctatattattgcaggccttgattggtatgtagcacttaaccatggtctatgtcaatttctcacaactccccaggcgatggaacttctatatcttcgccatcattattactgcaattacgggtggtctctgctttattcgcgaatcacgaccttccttgttgctggcctccgaagtgaaacgggtcaccgatatgactgtgcaatatattccaccgccactcaaccacgaccatatcccggatctcaatacgtttttaaaagaagccctatttcgtccagcccagctgtttttccaagagcctatcattttcgtcatcgcaatgatgatctccatcgccatgtccctcatctacatcttcactgaagccctccaacccatctacgagtcaatgggatttgcaaaaaccgacgcttcactgatattcgttgctatcggcctgggaacttgcctcagcacattgacccgtgtgttagacagctacattctcaactatttccgcaggcagggacgcccaattaagccagaatataagcttgtcgggctaggacttggtggtccattcttggcgattggtctatggtggttcgcttggactattccacctgggacccaaactccatggattgtgcccacactttccctcgctctggtaggctatgcgctgacggaaatggataccgtgctgtacggctatatctccgatgcttatctgagttactcggccagtgctaccgctgctgttgcattcatgcgagcgttgctgtcgggtgtctttccgctgttcacgacgcagatgtttaaccggttggggaataatcttgctatgtctgtgcttgccgctgtggcaactgcattttgtatagtaccgcctgtgtttatcttttatggagagcggattcgtcgggcgagcaagtttgctcgatatagctgggaaattcaggaggagctgggtaaagaaaaagaagattggtaagcttgggctttagttactatctgccgcttactcctaagaatacgacttcagctctagcgaccaaaatacccgcagaaaggcctttcgacaatgtcaactgaatgatctagccgcctaaaaccgaatttgcggcccctcatttgcctagtatattctaactagtagtcagaaaatacctcgtcataactaaatgaagtatgataggacttcctaagagctctcggacattttgtgctaccaataatgtgattggtgagataaaaacagaccctaggagctcaagcaccgagcgatctttctttcggcaaaagttgatgttaagcaatgaaaaaagtaggacataagagagaaaaccgggaagaaatgagaaaaacagcaagagatacctccgcatagccctgattgatgtagtcattttgcatgagccagtcataggcagacgaagcgaggagtttaagaacaaacttgttggcacatagcttccaaggactgcacgccgatgataatatccccttcgtgttgatttcggggtctgcggaagatgctttcaaagttgagcaccaaaggtgtaccatggatttgcccatatcggtacgtaactctctgtgttggtcggaaagaggtatccatgtgatttcgggtcttatacggatttggggaaggtccttcggaccatacctccacgtctactcgccatgttggcttgcgagtagtggcgatgataactcttggagcgagagagaagtatgaagaaggttagattctctacaacgatcgagatctagctaaatagctaggtgaagcctgacaaaccagacatcggcatgtgatcggcacgtgaccaccacaacaataacgacgcacttggtgagatgttcagagttgctataccaccaatgggcgtccttgcattgctgggagtaggattctgatacgccgacttcaagggcaagggtaggtaatcccgccccccttccccccacccatcccatcaaagatatcggatggagagagccaccagtcaggctccttagccacagactttccttgagttcttggcgatgggcgggatacgaacgccccattgtcataggaaaggcccattaagaatagctggatcaatttgagagaaaacgccaatgattgaattgtgtttctcaagggaacattctacaaagcatttgagatacagactataaggaccagaccaacaaaaggtaaacatcataataacttctgaacataagtaaggagatatatcaacataaaatgcacctatgccccttcagcggtcttaatggtggtatcctctctccgagtcagactcgattcccaatacttctctttcttgcctcgactaacgatcagtccatagatatcaaatggatcgacaaaagtctggagccaatgacggggatcatcatagccagggccctcaatctcggtgacgccatcttcagcgagataaatcttgtttgatcgcggaagccagcgcatgggatgaaagacattcagcaaagtggtattgctatacatgagcacaacctcaaagatccaaaagtaccattcctgtttcaatacaggactgatattctcgaggtcagtgtaggcattcagactcgcggcagtaaagtattccactgtgcgatagatggtacgaatcgtgatgagggtacaactgcagtataacaccagtagcgcatgcttgatcttgtggttcaatacgcctcctcgggcgcagttgaagtggaatcggcccgccaaggccacaaagcctgtcattaggacgatttgcatgataagcgccgccttcagtagcgccttgcctatgttttgcgagctaacactagagtttgcacttgcgactcgggccgctccgtttgcggtaatgctctcgatggccacacctagggctatgaaggttgtgaatacgcggcccggatggattggggagtggtatgggatgtagtagagtatgcggcccaaaatgaagaagttagcaccctcatatactggtctagaataatcgaagattggttgtcagtagcgtatcccattatgggctggatactccttacggtccggcgagcagaagcacagtgcttgctatatagacgcctatatttccccattgcccgaacgctccaatagtccgcgtgataaaacctcccgtaaacagaagggcagaccatggaagaagtccggtgactttccaggacttatatttgctgggggatctggttaatttggagtttcataatgggtaggggtcacatacaaggattgatatgcatggatgccgccagagatagcgaagagaatcgcaaaggcaattgcagcgcctttgttaggtgcatagaaccacaagcttccctcctctttttttgtcagataaactatcaatcgtgattgacttgggcgactcacgataagatgaccttggttcgagcatagttgttgtagatctatatattgcttggtgcgaacgatcgatttgcgtaaaaacaccgcactgtgtagttgatgtaattgatggtaagttggagaatatgagtatgctcagactaattcaccacactatgtaggtaggggacgttagacacatatatatacaacaactgtatgggcactgttcactttaggtaagttcgtattccttcaaaagcctcatgaactttattttggctacatggctcctcaaatttcctgaatttacgaataatacggagtagtcacagccaatctatgcttgggcctaaaatgacttcgtatttgcctctgcgctatgctcctaatacgaggctcactgccacagatcttcgacttatgattcgccaactttatcacgctaatccaacctaagtaatctcgttttcgcttgcttgcagtgcatgggataggccttcagcgtcatcaatttagttcagctcctaacatatacatagtattccgtagagaggttgataaaaatgggcatgtaaaaatgggcatgtaaaaatggaatagctttgaagcaagagggccgggaagatgtcctgtcgtggaatcatatggctaccgcagtctatcaccaccagtactccactaggtttacctgtacattttgtaatatgattaaacgctgaaactgtactgatatgcgtgacgagaggccactgttgtccgattcattctttcccgcatacatagttgcacgtgatcttgctgttgtcggggtgactgatagcccaaagcggtaagcgcgatgttgatctgtggatgttctggactttccagtttgatcgcgcgacccgcacaccttcgaaggtcaacgtcacctgcgtgttgtctagatactcacgagccgcccaaaatgccgccaaaacagccccagacatcgctgttccaagtttaccttcggttacgccccccgatgaccccaaaccccaatgaatgtgaccgctttttgaacgttgaggcgccagaggcttcgcaggaggaaacagagatcgtctcgcctgcatcaacacatgttactcttcaaccaccaaatgacacgagaaagcgcgccgtcgagaggtttggtttcacaaaggtcttcgaggagaccgcctcgcaactggatgtcttccatgacactgggatggagcccatcatacgtggagtactgaaggagaaccgagatggcctagtggctaccctgggagtcacaggcagtggaaaggtctagtcccgtgtattgtaatatcgcgataaccaagctaacgggttgatcatacacagagccacaccattttaggatccaagacccaacggggaatgacccaaatggcacttgacgttatcttccgctctttagagtcgacaaataagaccgatcatggtagcattacccccgtgatgcttgcctcgctggctgtcgcggacgcttctgaagcccaattgttctccgcccaaacatttctggaagctgtatatggcgaaccaaacggacgtacatcgagagcgcaaacaccgatgagcccatctcgcgccaatacccctttgacggtacgaaacccctttacgctgaactccccccaaggatccccaaccccacgaccaagcacccctggatcgtttctcccaagaccgagatctaaatctggaagcccccacaagatggatttgtctcatattaccagtccccatgacgctgctggatctggccttggccagatctcaactgagccctctggatggatcaccccaggattttctaatcctatcccctacacccactgcaatctatttgagcccaaatcagctaaatctcgactttatgtcttcaaggaacccacgcctgccttgaactttcctcgccgtcacatacgtgaacgaccatgcgcccttcctaggctgcccgatatgagccacctaactgtagatatggactcaaatgccgactatgtcgttttggtgtcaatgtacgaagtatacaatgaccggatctttgatcttctgtctccatcaattgcctcgggtcagggtaacatgtcccgcggaaataaccaaaaggatcggcgacgtcccttgctcttcaagtctaccgagggctcaccagatcggaaactggttgccgggctacgcaaaattgcttgcagcagctatgaggaagcactggccattttggatgttggtttaactgaacgcaaggtaactggcactggaatgaatagcgttagctctcgaagccatggcttcttttccctggaagtcaagaaacggacatactcaaagcgaactggtgaacacaactgggctggaaacgccctcacggttgtggatctcgctggtaagtagattacattcttactgtaagtctgtaactaatcaatctaggctccgagcgtgcgagaacagcaaagacagctggtgccacacttgctgaggccggcaagattaacgaaagtttgatgtacctcggccaatgcctgcagatgcaaagcaacatacaggatggaatgaaggtatgtttggaactcatagttagtgtgctctttttggcagctgctaacctacaaagaccgctctcgttccttacagacagtgcaaattgaccgagcttttgttttcgaattcatttccatcatctcaccagatgtccagaggccaatatccccagaaggctatcatgatcgtcaccgctgaccctgtgggtgatttcaacgccacctcccaaattttgcgttactccgcattggctcgtgaggttacggttcctagaattccctcgatctgtgaatctattctgtctgccgcttctggcagtcaccgctcaatcagtgggtccacttcgccaaattttgattcagccgaagagctcgagagagctgctgctgagatcacacgcctcacacgcgattgtcacggccttgctgtcaagctagccgaagaagagattgcacgggctgatgttgagatgagattaagcgctgccgaagaaagatgtcttatgatcgagcaagatgtgcgagaagaatgctgggcagagatggatgagaaaatggaagaggaaaggcgacgctggcagagagcatgggatgagcaggttcgtagccgtggatcagctcaaaacttgcaaaatgctaataaacccagatcggtcgcaatgacgagcacatcgacaagaaggttgagcttgtatcccgcggatttcaaagtaagtctgccattgaggagcgaaatatgataactcttaaactgacctttctctccagtctttgaggattcggcgtcgaacgaacgagtggaagagcttgagcaagaaaacgaccagcttcgccgcaaactcgccgcttttgagcgtgagatgcacaaccaatccccgacaagaaagaatagacccaagaatgccacgtccgcgcggtctaatcccctcggccgcggtagcgacgttgaaaacgctttgcaacgcatggatcaattgaagcttgcagataccatgtttgctcctccatcgccaggatcctcgcctatcaagaagacgaggaagatgggaactcggaaatgggacctcgccccagaggaccagatctaagctgccttatcctctactccgccatgactgttacgatttattcttcttgtgctttgagatactcaagcttttaattcctatgtttattttggttaatacggaatgatatcccttggctaaggcgtttggggcaatcgatcctttgtttaataaatgttcatatttcatttccacaatcccagatttggattttgcgaatattgtacagggtagctcgtaagccattcaagccacctgtctcttaacgccatcctataggtcaaatagatcctgccctgggaagaacaccccatgtgctccataaaccggaaagaaaaaaagaaagcaagcccactcctggattgtaaagcagattcctcaggactcagaggatgtaatgtccatggcatcttgtttcccggtatctcgcttgtcggcgacatgctcaatctcagtatcattggcagattgatcgggagtgtggatctctctcttctctttgtgttcttcctccaactttgttccatcatcctgcatgtcctcatcctcgtccctatcaccctccccttcttcgccttcattctcatgaccaccctcatcgtcctccccgtcacctccatccgcaccttcatcaccggtccccgcctcctctgcatcagtgacatgagggaaaagcgccgaggtcccctcatcacctagcttcgtgtcctcattatcgctcagctcagtctcgtcagcactgccatgctcatctctttgctcaaccgagtcatccccagtaacagaaatctgcttggctgagccacgagacgccgaactcggcccggcagcagtatgcccaacaccctgcggagtcgcaggtggctccgtctcgcccgcagcaattattttactcgccacggcccggggagccagcttcgtgttcacgattgtgtcggcgcgtttttggatgtcgcggcgggcgattccctttgtccggccgcgtggtgccgggttatcggatactggaatgaatgttggagcagttgaggtctcgggaaggccgtcgcctagcgtgagaacgtggtcgactttcatcttttctttattttcctcggttggttgttcgaccaggtggggcgtgttgatttcgtagagtcgggcgtagaggtcggcgatcaggtcttcgaacatggtgattttcatgaggttgttgttgagcttctttagctctagggcatctcggagcagttccaagatggcctggctctctggccccagttgaggtaggctttccaagcgagctgtcttggtagagaactcttcccatccgattggtttgaatacgctttcttcgtgaccttcattgattttggctgcgcggcggatgatctttgcgtaagttagacaaatgtcttcccacagcttggtgtggttgaagaaatcgccttgcttctttctcacacggcgcaaaagttgatctaagcttgcacgatcgtcaagctggtcaagcaggccaacaaaaaagtacacgtagcgggtcgtgtaaacgaaatgtcgacccggacgttcaaattccggccgccagacctggatcgtaagtgtcttggtgaatatttgggaaagttcctgcttggcagcaatggcagcggtcgcgttttgctggtcgtcgtaaatgatatgcgcagcctatggattgtaagcagtatgaacaaaaaaagatcaaggtgcgggtgatatacctttacacccatacgatgatgccagttagacttgtcagcgctcttgtacttccgaaggacttcgagtatgtatgtgttccaaccctccatattctcaggggggtcgatcttacgggcccagggagttgcaaggaggatcttgcttccttcggtgggctgatattgctattagaatgggtccttcatatcaggagcgatacaacttaccgtcatgtttcctcgacgaacaagtttgtgcacaaaagagaagagtttgaaatgtggctcaaagataggatcagagcgtgagtctcttcgctgcggaagtgcagcaatggcatcgagaatagcatttatcacctcttttacttcgaccttttttggggtcgttctcaaggaatcatcgctggtgaacattttccaaagacatttgccaagcgtgtagtgagtcctattgagtgttagtactctttctaatgtccccgctctgtaaagtcccgttgaaaccacttacatccatcgcttagacttgtcaacagctgcccgtttgagaaggttgctagcaaaattccacgtggaataagctgacatctccttaaaaggcgttcccttgtacatttgttggctcacctcgctgctgtaatgacgagggaagtctacaacactgaagacccccatggacagcggctcgcgagaggatgagtagaggcggataccaaagtcagagtaaagatctgacatcgcttctctagtctctgccgttggctctgcagtcctcattgctgttgaaacagccatggcataacaatgaatagcatttcgctgcagtgctgccaagtccgaccggttgttattaatcttatcagctgtccatgtaatgtcttcatcaagctttgagtcataggtttgggcaagcctataccaggtttcccatctgtctgttccatgatccaggtcttgtctgaagaacccgatggcgtcatcaagctcgcttgttggaccagggctaagacgtttctgggatcggaatttggtgagtgcggcatggccgagaaggaagaaccaccccttcgaagcgatcttcgcgttctctgtaggaactatcgtcgtcgaaagctctgtaataccctgaacagcacggagaagattggatgggttgattggagctttaagatatacattcacaaggcgacgattgaaagtcaactgaggtgtctgtgaagaagccttagcggggccaatcgcttgctgcatcttctcgatggtagtcttcaattcagacttgaacaagtccttcatattcatcttgttggcttgttgcagaacaaagtcgatcatcatgatcgctgtagggcgatctaatttctccggaggacatccatgatccacagtcccatcgaatgcagagaatttgataccgtgtaggtcgagaagtatttgacagacatcaaattcataatcacccttggtttcaaggccaaagagttccgatttcagaagtttcaagaacttcttttgcgaatatctgcacatcgatcgaacgcccaatgcattatggacggaacgaagaaaatggatgcggtcttcaagcggatcattgaaaagctccttgttttgagcaatcgcttccataaagagggtatattgtaagatccagcatcgaacatacagctctcgcattttttctttcatgttttctagcgatttcgccaacgagcctcggaagtcgcgaccggaaatctgccctactcgcaccgagtcctcgtaaaggataaagctatgtagaagcctcacgaggcgggctatagcagatattgaggtttgtaaatgctccatgtcgaaacagtcaaatgcttgttccgaatcttcgagaataagcagtatagccttggccacaatgccatcgagggctttcagccagcccaacagagctacttgacgatgttggcttgtttcctcaccgtgtttcgctgcctcaagttctgccattatcacttcgatgcttcgtaaatagcaagagacaactttaggagggtagtcaatggcttggtatgcctcctggagtcggcgccagaggaatagtcgcaatgtagcatctcctctatcgaggaaggcagccatctcagcgagatgtgaggtaggatggttcatgtcactctcggttggcatttcagcatactcgatcgacgagggctcaagaattggctctattgcttcgatgagagtcacgggatcctcagagtctgagttgaataccttggcgaaaaagtccatgcacttgagcttcaagacctcctggtctatcacagcagcggacaattctgacatcgtagcattatttatgagagtgacacttgggtctccaagggactgaagtatctgcttcaggtcttggagacagagcaagatatgttctcgctgtgcgtccccggcaagattgacatgaaatgccgatgcccacaaatggcgcaaagtgaggtttgattgggattcgccggatgggctgtggttgataaaatgatctatggatgaccgggctaacataccccagcgggccagccgatcacgctgtgcgagttttgtttcttggtctgtctcactgccaatattctcaactgaagcaaaaacatctagatgaagctcgtagatggtttgtatcatctcgaattcaaagaggtctttagccttatactcaaatggagctctatcgcttgagccaagaattcgagcttcaagattcgcaatcagttcgctgcacgcccggtaggtaaattcatcctcccgaactagaatctctaccactgtcttctttagaccctttggccacaaaaaattgacgtaagtcgactttgccgtcgaccagttcgaagtctcttggccgaagtccggcatgagaagacactttagccattcgaacaaagtttcatgggaatgtagccagtcagagttgatggcattggaaaaattataaagttgctccccggaaggaagctcttcctcgataactggcttccaagcaccttttcttgagtgttcaaggaaaacagccaatcccgacttgcttgtgccacggatgtccttcagcggagataaatcgtctttctgctgcatcaatcgagacttttcgtcatcccatgtcttcatgagccctcggagatcccgaaacaatcgcgtctcaatatcttggggtgtatcgcttgagtcattcgcagagcacttttctcttaggtcttcaacgctaccgagtacatcgataccgatcttcgagaagagggagtcgacagtgctaaacatccaatcatcggcattgacaaaaacctcgagacggtcttcgtaatacttgtcttgatcgaatgcaacttcttcaggtggtagagtgtcggcatttgactctcgggctcgggtccgtctgcttttcatgcggccgccctccggttcttcgttcgcagccgacgcagacgatcttttgcggacgtgcactatagagttcgtgtcaacttcttctgcatgagtcccatcttgttcggcctgttgatcttgtggctgcgttgattgacgttccagcgactccatcaattgcttttcagcactctgatcgatggacgactgttcctcacctcgctcagagggctctttcgttggctgaagtaaattttcttcgggcttgccattactttcggttgcctcaagcatcacgtcggcaacctcattacaacccttgtgtccctcgttatctatagccatttccgtgtcctctgcattgtgtgtgggtgtggttggatcttgggagtttattgctggtaggataataccgatggaccgagtgggaaccgcagcgagcgaatcatgatcttcatcgtcaagtgtttggagaagcgccttgccaactgactcccaggtcgactcggcaggatttatctctcggcgtaaagcgtgcagggcaagagggccctttgtcggatttaggcatcgtaaatcggcaggaagggcgggcaaatttgggtatggatcctcatgctgtttgaggtatttcaataatgctttttttggcctctgggcggggatttgcgacgcagataacttgtcgaagagggactgcagcgtgctccgcaagcgttgctccgcgaatatctcctctaggtcaagctgctctgaccttagttccaagcgattgtcatcgtccgctagcacactttccaagcaataccgagacaaacggtagctgtttaaggaactgctgagtcttgcgctttgcctccagaggttgagatctgagtcgtcacgctccaaggcatccccaaaagaccctaaagccttccttgatgcctccgtcaacttcctttgtgtttcctgctcggattcgggggtctgtggcgcggtttgtatggagtcttgtactgaatcgaggacgaatttgccgtgatttttataggacagataaagcgtttggaatagactagaggtagagtcgttgacgttgaactcagcgattgattctgtagcaagttcatcttgcacatcgtcgaatgcaccccttttgaaatcagagatcgactctgggtatttgaagatctccgaattgagaagagcttgataggcctccgcagcctggggataatgctctggcccttgtgaatgcagcttcagggcaccgtggtaaagcttcaaagcttcctcgatctgaagctccttggtgtcgtcaacttcctcttcgacagcctcatcgggctccacattcaatgcgacccagctcgacatggtatgagctccacgtagggtccctcaaatcttagctgaaaaagagaaatctggcgacagcatcggggaggatactaagaccctagactagatgcgggcaagaagcaaatcaattggttatcgcggacagcacccatggacgttatcacgcgttgcacccaatcggggaaagtgatttggggcctgggtgcctgggtgccttgtggcctggaacccttttcttagagagtaataacagttggggtattctagatcactcttcgctttcccctcagcgcaacccctgaaacgtcttacgattcacgcagcattcattgcattaagataccctcatcttcgattccatcgcgcttgtgcaggtgccatggtcgcgcccgctgttcctgagtatgtgctcatctccccatttacgtgttccccgggttgcgtatgcatggccattgttcgagattgtcaagagttgccactacgaaaattacaggaggtgtgactgacattgagaatataatttaggatccatgaggaggaggatatctatgttgccgtcgatgcgcgaacggagtccttgcagagcttgcgagaactaggccctccagacttggtctatttggtgaagcagcctaaggccaattccactcgccaggtaggttagaagataccaacttttctttcatgatacaatctttcatctgtgaacaatcgattgattttctatcgatcgcagaccggactttatcaccatgtcaccggaatcgacgcctcctcgtccgcgagcttagccgcctatgttaataccctcacattctctcccctcgacaagacgcataaagtggtatcggggatttactggttagaatctatttggtacagtgttgggttcccatgctgatgtctatacagttgctacaatgcattctcccatctcgatatgcgcgtcgaagtcaaaatccccggaagcttggagagctactgcattgatgagcgcggtgacaagcgagttgctactgaggctctttggcttgagaccttcctttgcgccgttctgagggcttacctctatgcggacgacggaagtggagattctgtcaagaagattgttggagttcggcgattcaaccccgtgacaaacacggagatggagcacaaattcttagatgctgccgaaaagctgttcttcttgggtatagatatcgaaccaatttgcctgctgtgtctctgactaacaacatttcaggccgccaactgagctctgaccccgaaacccaagtccctaacactgtgagcaaccacctcacatccggcatcctcaaatacatccacacgactggccgttatacatctggaatcaacttgtttgagaagcttcgcacaaaggatgtagaggtttcatccctactggctcgtgtacagattatggcagacgaggaggtgcaagcggtacgcctcatgtacgacgctttgcaggatgttccgatggactatgctcttcttgattgccaggctagtttctgtcaaagcaaaggcgaaagcgaaatggcacttgagtgcgctaagcgtgcagttactgcagctccaagcgaatttagtacatgggctcgcctcgcagaggtatatgtcggtatggaacgctgggatttggcgcttctgactctcaactcgtgccccatgttcacctatcaagataaagatacccctcgcatgccacaaccgtcacgcatcatgctcccaattcttgctgaaagccttctcgatgaaatcgacgaaggccagccaaaacagggagaccctcacgactatgttcacccctcgcttcgaaagatccatgctgctagctaccaaggtactttcttaaaggcgtacaatcttctgacaaaaattgctgctgccattggatgggatcagttactcaaggctcgcagccaggtcttcgtgatggaagaagaatatcgtgttgagcgacaacatgttcccaagcccgctacgaacggcaacagccccgccaacgaagatgactctagctctgtggctggccctgactcgagcgagccgtcttcggaagaaactactaatggagatgcgggagacagtcaccctgaaagccccctcgagcgaccggagcaaacagtagcatctgaagttgccaagtctggcaaggaagatgtatgtttaaaacaattctggacgaatttcataatgagctaactgtttgtcacagcccgacccatctcacgcttcatacacgcaattccgaaacaagcgactctgtgaaagatggctagataacctgtttatggtactttacgaggatctgcgcatctacaccatctggcggaccgaaatggcccagtcccgtcaacaagcaatggagtacaagaagtctcctaccgagtgggaaattcttggtgagcttgcacagagactgcaccatttcgacgaaagcattgaggcataccagagctgtctcgccactcggttctcgcccaaggctatgcgtggagtgttgaggttatacgaaaagcgaaatgacaccagaggcatgctcggcgcattgatccgtctcatcgcctggcaatatcgctggtactccgaggtatgctcctttctctagctaatattgctcggaccactataactaataaactattcagttctcccccgaacttttgttcctagttcgcaagctcattgaggacgagggtgctgtcaaggtccgcagcattgtccaagcgacaaacttgcctcaagccgtcctcgacctcacacaccagtattgtcaactatgtgccaccttccgcagcagtggtagcgacacttgaatatgttcgcgatgatcgaagacaagctgagttggagttggaggacaatttgatgccttcccctggatatcaagatagaaagtggagcacaggcagggctaatgaccacccttgatgacaccccttgttttgcactttctcttggtccgattgttagttttcttagatggtatatattttatatgttccatatctagtcgtgtgcgccattcaacatgataggtggatcccgtacggagtaaccctagtagtttggggcccgtatccatttaggcctcgacttctcactgcccaacgctagtatatgcatcggaacccactgtggagagaaacataggactcagccagtagcggcgatttctatgcacgtcatcttcaagtccccgagaacacagcgaggattggctacttccatgaactaacttgatgtccctgaatctagacacataggactctacattcacagcatctctagttggatacaggagactatcacagcaaaacaatccaatcacccactcaaggccgaattgtattttagttcaataaattttttgccgtaaagaaaccaaattctcgatagcaaaatcactgctcttcttcagccgcctcaatttcagacagatctgactccttaggaacaacaccttccttagctcgagcagcactggcagccggaacactcttcgtggcggtatcagcggcactctcttcctcggcgtcttcctcggcgtcttcctcaccaagctcttcgtctcgttcgccacttgcgccgttcgcgccctcggaaccctcgtcatcatcgacgggaatggcttcagtcttctgtttcttggctgccggggcgcctgaaaagaggtgtatgtaagcgtgggaaagttggggatgaagaggatatccataaaggctaagggtaaaacgtaccttcctctttgcctttctccttgcttttgtctttgcctttgtctttgccttctgctgttggtttttcttctgctccttctccttccccttcctcatcttcgtcagactccgactctccttccacctcttcctgttctccctcgtcgcttccttcctctacgtcgggttcggagtcttcatatctaattcaacgcgcgatcgggttagcaaagaccaattatgcttaggaggtttcgcgcgacgtgtttcgaggtcgtctcgtgatggaggcatagctagtacaaccgtgcagaattgtagtggaatgatgcgtaggacatgcaagaatgcgaagaaagggagaattgataacgggatggaacaacatatgaactcactcttcctcctcttcgctctcatcgctaggaagggcctggagctcctcctcagtctcttgctttctcttgcgggtagtcatcgtaaaaatatttaggaggttggtaagaattaacttagtacagaggggagggaaggatggaattataaaggagagagagagagaatgttctgaattggcaaaagtcccttgagtcttgggggggaatggtaattatagagaggagcagagctctaagaagaagggagggggaaacccaagagcataagcgggagtgacggtgacgacatgggagtgacaagaccttagggttaaggtgatagcttacactccggagtgcgtggtccatgacagaagtgtgcgtgtcgccaaccctggattcttgcgctatttacattccgtgcccatctaactatggtatccaaatgttgatatccttggtatccttgatatttttaggtttgcgtcgattccttgctttgcgggggtcttcatggtcattgtgttagaaagtcaaaatctgccatactcggatctagcagattctcatcgagaccaaatccgtatgtgccgaccattccatagatcagatccggtggagggaatccctgtgccatggcattggctcccccagggacctcgcggccttgcagcgcagtatcgttgtttccttggaattgccaagaagcctcccaagagtcaaagcgctcaagcatcttgcccaatccacgtgcgatatgtcgagtaagatgtcgatcaccggcagagacgcaattcattaattcgatcacacgttcaactaaccgtcgcacttgtcgagcgttgatgcttaggtaagctgtgttccaattgattgcgaccttgagtaggaaaacagcggagaatgtaaccatagtgtgggtgaagatcgggacgccaacaatcgcatcccgaatatcaggctcctcaagaaccatattgagacatgccattgcggaggaaattgcgatgttggcggattccttgcggtccatggagaagacgggtgtgttggatggtgagagcgcacgaagagaaagcgagttcagctggaactttgcaaaatggtagtgcagaaccactcctttcgatggataagtccgcacataggtgctatcggctgtaatgcattccaagttatgttagaaccgagagttgctgagaattaggctaaaatgtcactcaccagatcgaggctgccagagaagtcgccattggtctactgcaacattgtatacgcgcaactgtccaaaatcttcctcagtcaatgtttgttcagtgtcgctaccaaacattcgatatgcctcagtcaaaatcataaagagagccacttgagctaaaagtcgaatgtctccggggacgatcatcggcagcgcgaggaaggtctcatagttgcggatcaccacatcctcgtggatgacaggtggccgcccataagcaatactgaagtgatggtcgcacacgtaaagcagataccagagctgcgcgcgctcatattgatccgtgtgtccacgggtcagacgctgataactttgatggagacccatctcggtcgcgattcgtactgcatgcccggacaacttccaactcaactctgacagccagaatgcccccacacagaggcctcggatatcatccaaggtgtgggcccgtgtgagggccatattggatacgagcgatacatactcgctgtagcagcggttcaaagtttccgtgcggttcggaatatgaagtgccgcgacagtcaaaacggctgcagaaagaagcgtcgatgcgcgacggacggacgttaaatcgcggtgtacaagaataattccaccccacagtagctggttcatggtgcgactgaagtacgcgaataattcttccgcttcatggagggagatcaatcgtcgtgagataaaatcttcctctagcaatgtctgtttcggtgcctcgacatgattgtttcttaggttccgtaatttagtgacctcgtatagactgcgcataggagcaggcactaattctgggtcttggagatcctgctccggcgacggctcccgagtaacatccatcacgacgcccagtccctcctggtgactgatttgtgtctgcgatcgactgacggaagggtggccatgatacgactcggcaggactggggccattgagagcctccccggaagcataggttgagagctcaggcagtccgccttgtcgcaataggtgcgaaacagccgcctgcagctgttgcatagtcgcattggcctgtgatttccatctataccagcgccattagaatagcgcccccgataggtccaaagcctcaccaaagggccggggcggggtcacacgtacatcccatcatcgttgacaaatttctgtgaaaagtcgtttacgacgcacttgataccgctgcgagtacattttgtacaagttgactctcctgaccgaaactcacagcgaatcttatgacgcttgcattctgcgcctattccctgttaattaggaggcattggagatgatgtggggaagactcacatgcacgagctttggagatcttggggacagaacgtgtcttgctctcttggggtgattccaggccagcgtcatcaggagatcgtttcagtggagtaccggtatccatgatgtgatgctactctagaggatagtgggaagagtcggtgatactccggcacgcagtttaggggagaaatcttctcccgagtggggggaaagcgtcggagtaaagcgagttggcacgagtacgccgaagagccagagataaattgcagtttatatttcaaggaggttgttatggccaatagggtaatgtatgtacaacatagcaagagaaaggaagaggacaaaaataaatcgtgtgacttgggaccccccgcagactcgacttccccgaaatcctcaccctagacgttattctgttgagatattgttggctttttaagattcaggtctgaatttcgaattggacatgttccttggatagagtctagtatatagcttattgtcctcgacttctaactgacaggctgacaggtcacaacacccgtggacaaggcattccccaggattcaaccccaattgagatcccccaaacaaaagagggccctgaaagatgacactccaaggcgattcgcgcacagcagttccacagcagatccacttaggaagtgagtcccggcccaagtccggtgcggaggaccagctacggatcgcctcggacttgatgcgaatgcggagactaaacttacatattgaaatacatcatcatcatcatccctcccatattccctcttcatcacaccaatctcaagaaaaatgcatgtcctcatcactggcgctgccggcttcatcggccaattgcttgcgaaagagctgttgaatgacccagcctatcgcgtcacactgaccgatatacatcaacctccgatccccgcgggcgttcgctatcctcaatccgcaacggcaatcaaggtcgatctcttgacaggcgccaaggacattgtcgattcttccttggacgccgtctatgcctttcacggcatcatgtcgtccggctccgaggacaacttcgatctaggcatgagcgtcaacgtcgatgcaacccgcaacctactcgaggcgctgcgacacacctgtcccggagtccgattcatctattcgtccagtcaggccgtatatggccgaccgttgccagagattgtgactgacagcgtaattccgaccccagagtcctcttacggtgccgagaagatcgtttgcgaaacattggtgaacgaatacactcgccgtaaattcatcaccgggtttatcctgcggtttcctaccatctccgtccgaccgggtgcacccactgctgcagcttcgtccttcctttccggcatgatccgggaaccccttgacggccagcaatgtgtgatccccattaaagaccgacagttcaagtcgtggctatgctcgcccaaaacccttgtggaaaatctccttctcactctccgtcttcctgcggactccgttcccccgcacattcgccagattaatgtgcctggaatctgcgtcacagtccagggcatgatggatgcattggaagccgtgggcggtgcagataaactcgcccttctaacagagaaggaggaccctgcgctggttccaatcttgaagtcatggccgacgcaatttgataacactcaagccatctccttggggttcaaacgcgacgagtctttcgagcaaaccgtgcgggattataaacagtcattgacacaatatagatcttaaaagttcaatgacatcgtttattagttgatttctaaactctttgtcattttacctgttacataaaacaaggaggtttctggtaactatagaccagggttgtgctagtcagtcagttgtcagcccaagtcgccatctgggcaccacccgcttttcctaccaactcacttcaactcttgggctgttcacccacttgagtgggatattctataattttttactccgaaaatcaattgtttcaaaatgccaacacaaatctcgcttctcgtgtacaaaggcgtgccagtagacttctccaaataccgacacacagcgctgcacgccctctactccgacggccaatatgattggcttcatgctgtcggcgcacaccctttcttcaaatttcaaaaggacacagagaacccgatttctgagccgccaatagcctggattcctgtatgtacggtgccggactctgtcactagggagaagattatttgtgcatgtgcttgcacgccggtgcgcaatggcaatagcgaccgagactggaactgccagaactgggtgggggaggccttgactgagctcgtcaagattggctgtttgaccaaagaagagcgcggagtggcgattggtaaaatggtggagattatcttagaagcggagctggaagacgtgagtcccgttctggataactgttctatgcaggaaattatgtggactaatgtggatttgttgcttgtacgtaggatgggatgtattagtctttatggcttttttctgctctggtcaactggtttcagctgtaggttgtcaatttgtgtcatgccacaacctgggagacttcaacgataaaatttcttcagagactgcagtaatgatatttagtttaggtctcttaatacatcgctagtcaaggaaacatagccagctgtacatatgccactggcacataaagcataacaccatcagatcggagacatcattgccaaacctgcgattctctcagcacgcgtcctggaaattgcatcaacagctcgcccaaacctgtccgtcaatggcaataagccgattaaacagctgattcctcgtctccatggcagtgagttgatatgactgccctggcatcttgccaatgatgagcaaaccatcaaccacctccttaccatgaagagcccaaccaacaaccaatttccccttccatcccataccgcctaactttcgcatctcctggatctcagtcaccggcatagtgaacataaccgatccatctttgcgattctccaattttgcgtctccattctgcggcgtatcagttgtgaaatacagcagcggaggctccttggtcgagtcaataatcgcagtaccgcgcttgcctttgtatcgagcatcaaatgccacaggtccacttggtgttatcctcttccctctatcacgtaggacgccaacccgattcttagcatgatgtgaaccgattgctgctcgtaagcgatcgatccctcttttgctctcaacaccactggccgttgtttctcgaaataagcctagaatgctcgatcccaatgtccttttatggctcttctctggtgctggtggagcttcgaccgcctggacatggtcgtcaggcttaaccagtgcagcttgtttaatttcctcgttactagcacctagggtcagttcctccggattcaaagagactggccgcgagggtactttgcctggtgaggttggaggaggcggaagtggtgacgcattagcttcgccgatgcggagaagagtaatagccagctgagcatttgttggaatacctttcaggagggaactgttgcgagttagcattgtgagcatatgcactgattgaatgcatacttttgcaactgaataatcttccgccaattcggtaggcggcgatttagatatgaaactcctcgtctgatgacagggtctccaaagaagacgagcccgatcagaagtgtactcagcttcataaaaacgtagcaagatgtcattaatgaagctaggaatgccgggaacaacaccgtcgccaggcgcagacgaggactcagtcgaggaaacggggttgttgcggatagagcactagataaacaaatttaacaacaagccatgagtaaaaccacgagctcttactcacttgcccatcttctcataggtatctgtgatatcgcctattacgtgcattgaagagtttgcaatgtccatcacgctctgtttcataggttgtcgtgttttgtcatgggagtctgtcggtaccttcccatgggcagcgctttgcgcatcggcagtattggcaacaatatccatcgcgtctggaacgtcatcttccaagggtgcatcatcagggaccccttgatcatgcttcccaactgcgcttcccacggccacactggcaacgcttgcaacaagattactggcctcttgctcggctgcttcgcccttgaatttctcgggggccccggtaatactatcctcagacccaaggattcccgcctttggcttttgtacaccacccgtatctttgttgacaagagaaattggagcgggagggaacatgagtgatctacacggtggatagagcaccagggcaagtaggatgaccagcatagttggaacaagtagatcgagaaggcatgatagtacgtagacctacataatatcagtagcgctccaaatacatttctctagaatggagacataccgtgcaaaaggcagcggttcgtcgcggctccttccaagaccgtagtcgagcaatatgtttgatacaattggtcaatccaacaacaacggttgtgtaaaaacgttcaattgtagccctgagtttatccggcgagaattcatcgtcgtcttcacgcgtgaaatccagtttctgcagggaaacatcgggaactgctttgactcgatacatttgctggtgtgcaaattgacaaggtcggtttcaattctcctacattttcatgtggggtgctcaggacataccttgtcgaatcgtctaatgagcatccacaaatcctcatttgatagcccggccactaatggttcctcgatgacatctggagattcatcccatccaatattgctaatttccgctgtgtcgccagctttttgtgcaaggcctctctcatcctgttttatttgagatagcacatggctatcggttggtccctcgggaatttcaggatccgtagtgagattgttgtcggccttgattgtagcacggtcgactgaagcggatggcgtcgcctgtctgtcggttgcagacatgagtgtgaaattgttctaaagttccctagattaacttgaagggtttgttttgaggtcaaccccattgagaggaagctttccatgggacctggaacctgtcttgtagttgcgcagactgtcgacgtcatcttccttcggtggcaatcaacacaaccttggaagcaaactggattattttaagtaacaaatgtcatagaataaattgtggtaataaggtttggctggtgaaaaagcactcgaagacatagacctgacttttattgtttgggtttgcgcgtgggttgacgaccaaggcggctggctgcacgagtgccattctgggtggtcatcaattctagttctaactgcaatgcaaaggatgaaaatgacctcgagatgtaaatgcgactaaattatataaatgagctcgttgtaaatcggcaaaccaagtaagatggatgcaagttaagagcagccctccccaggtggtcttacaaggattgcaatcaaccttccttatctctcttatcaacacgtgccagtattcccagaaaggcaacatcatcgcgtccaagcaaggagaactcatcttgatgataattcgctctactaatctgccatccagtcactggacactcgactcgccatgagcgaggagtgtgcaaaccccctactcctggggtggattaaagaatggctggatcaagctcgagaacggaatagcaaaggcgtgaccgtgtacgtatctcttggcgcccatcgggaaaagactatatctgacatcttgcaggtacaagaaggcttatgagtcaatgaaagcctgtccgttagaatttcatcatccggctcaagcgcagcaattgaatggactgggtcctaaattgtgtgaccgcttgaccgataaactaaaggcccactgtcaagaaaatggacttccaatgccggaactgcctgggaaaggtttgtggtatcacttgcaccctggccccggaaacggacgctcaactaggtcgaataggtggaaagagagcatctgaaggcggcgtggatcaaccggcgaagaagcctcggaaagccaagccgtatgtaccgacattacgatctggtccatatgcactgatgttggccttgggaacccaaaacgagaatgaatcccaggggatgaccaaggctcacctgatcgaggtggcccagccattctgcgacagttcgttcacggcacccccggacccgaccaagttctacactgcctggaattcaatgaaaactctaattcagaaagacctagtctatgaacatggtcgtccacttcgaaagtatcttctttccgaagaaggctgggaggtggccaaacgtctccaaaagacattacctggcgatgttcaagccgccatgtttggctcccaagctactgcaacgactgagtcacagcaaagagcatcgacagccgaacttgcctcatttcaacaagatgatgatttattggcagacgctcaagaaaaactatccgaacacgacattgccaacatcgagcccatccttttcccagctaagagcttcactatccatctcgttttagacacccgagaagtccgcacctccaccgaccgcgactatatctccggcgaactgatcaagcaaggaatcaagccgcaagtacgtgccctggaagttggcgacgcaatgtgggtagccaagtgtcacgatccaactttcctcacgagacatggcgaagaaggtgatgaggtgatgctggactggatcgttgagagaaagcgtctagacgatctgattgggtccattaaagacggccgcttccacgaacaaaagttccggctccgtcgctccggcatcaagaacgtcatctacctgatcgaagagttcgcagtcacgcatcctgactcgactagcgggagtgcagctcaatgccaggagatggttacctcggccatcgcctcgacacaggttcttaatcaatactttatcaaaaagacgaaacatctggacgagtcaatccggtacctagcgcgcatgactctgctcttacgaaagatgtatggggtcgaagatgcgccctccatcggagacactgatagcaatatcaaccgtagcacggttcctgcatctccagtatccaaaattggcctcatccccggccgccgtctctccactgactcctacctcactatactggataatctccgctctcaagatccgtccatcacatacggggtttcattcgtgaccttctccgcactcacttccaagtccgacgttcttactcttcgtgacgtatttcttaagatgctgatgtgtacccgtggcgtgacgggcgaaaaagcccttgagattcaacagatctggccaacgccacggcatttggtggatgcgtacatggctctagaatctaaggagcgagagatgatgatagcgactcggatgtcggaggttgtagggcggaagaaagttgctaaagatctcagcaagcggattgcagaagtttggggggaggtgaatttgtcttagaaaggttttctttcaaggctcctttgaagatgacatagtaccgagttcattcgcaggtattagatacaaaagtaacgccaaaatgaaataaatgaatatataccataatgcctacctcttccttctcacaatcttcataatactttctttgttaatcctcaaagccaag

SEQ ID NO: 9 - DNA, 4395503 bp, Penicillium roqueforti (residues 1,465,169-2,930,336 of 4,395,503)
  misc_feature (85031)..(85335): n is a, c, g, or t
  misc_feature (96911)..(97034): n is a, c, g, or t
  misc_feature (167456)..(168880): n is a, c, g, or t
  misc_feature (174644)..(174784): n is a, c, g, or t
  misc_feature (186874)..(192764): n is a, c, g, or t
  misc_feature (360720)..(360911): n is a, c, g, or t
  misc_feature (391859)..(392018): n is a, c, g, or t
  misc_feature (496616)..(496804): n is a, c, g, or t
  misc_feature (596148)..(596377): n is a, c, g, or t
  misc_feature (682735)..(683365): n is a, c, g, or t
  misc_feature (719025)..(719113): n is a, c, g, or t
  misc_feature (843411)..(843580): n is a, c, g, or t
  misc_feature (1092789)..(1092960): n is a, c, g, or t
  misc_feature (1157612)..(1162711): n is a, c, g, or t
  misc_feature (1192629)..(1192806): n is a, c, g, or t
  misc_feature (1228309)..(1228420): n is a, c, g, or t
  misc_feature (1338837)..(1338992): n is a, c, g, or t
  misc_feature (1570220)..(1570421): n is a, c, g, or t
  misc_feature (1572469)..(1573106): n is a, c, g, or t
  misc_feature (1778958)..(1779105): n is a, c, g, or t
  misc_feature (2068448)..(2068525): n is a, c, g, or t
  misc_feature (2226907)..(2227126): n is a, c, g, or t
  misc_feature (2309629)..(2309784): n is a, c, g, or t
  misc_feature (2399286)..(2399465): n is a, c, g, or t
  misc_feature (2468194)..(2468410): n is a, c, g, or t
  misc_feature (2498732)..(2498791): n is a, c, g, or t
  misc_feature (2576563)..(2576818): n is a, c, g, or t
  misc_feature (2701365)..(2701585): n is a, c, g, or t
  misc_feature (2766468)..(2766583): n is a, c, g, or t
  misc_feature (2901265)..(2901529): n is a, c, g, or t
  misc_feature (2994270)..(2994415): n is a, c, g, or t
  misc_feature (3046136)..(3046256): n is a, c, g, or t
  misc_feature (3064281)..(3064611): n is a, c, g, or t
  misc_feature (3131064)..(3131222): n is a, c, g, or t
  misc_feature (3154998)..(3155745): n is a, c, g, or t
  misc_feature (3156700)..(3157011): n is a, c, g, or t
  misc_feature (3186962)..(3187622): n is a, c, g, or t
  misc_feature (3198509)..(3198780): n is a, c, g, or t
  misc_feature (3203214)..(3205188): n is a, c, g, or t
  misc_feature (3205915)..(3206227): n is a, c, g, or t
  misc_feature (3207673)..(3207831): n is a, c, g, or t
  misc_feature (3257366)..(3260963): n is a, c, g, or t
  misc_feature (3261769)..(3386768): n is a, c, g, or t
  misc_feature (3388230)..(3394660): n is a, c, g, or t
  misc_feature (3513991)..(3514321): n is a, c, g, or t
  misc_feature (3520839)..(3521231): n is a, c, g, or t
  misc_feature (3528652)..(3531206): n is a, c, g, or t
  misc_feature (3533597)..(3533708): n is a, c, g, or t
  misc_feature (3544084)..(3544271): n is a, c, g, or t
  misc_feature (3640948)..(3641139): n is a, c, g, or t
  misc_feature (3768143)..(3769865): n is a, c, g, or t
  misc_feature (3862492)..(3862826): n is a, c, g, or t
  misc_feature (3867863)..(3868500): n is a, c, g, or t
  misc_feature (3874062)..(3874753): n is a, c, g, or t
  misc_feature (3907446)..(3907673): n is a, c, g, or t
  misc_feature (4023526)..(4023682): n is a, c, g, or t
  misc_feature (4214599)..(4214744): n is a, c, g, or t
  misc_feature (4215831)..(4216343): n is a, c, g, or t
  misc_feature (4384545)..(4386964): n is a, c, g, or t
  misc_feature (4389389)..(4392902): n is a, c, g, or t
  misc_feature (4395501)..(4395501): n is a, c, g, or t
ctactcagcacaacagaaatactacttagcgccatggccagagcagcccacaccggactcagtctccagtgctcattggtcatgatcatttcaccattaatggttttatgatgatggccactcacgataggatagaggacaccagcagcaaccggaaccaaacagaggttatatataaccgcccagccaaagttcatacggactcgattgaacacacggcgactgagcaggaccagctccaaaatcgtgctgagatctgagttgaggaggatgaagctggcggaattgatagcgacgtcggagccagatgccatggcgatgctcacatctgctgctgccagagcgggcgagtcgttcactccgtcgccgacgaaggcgacaatgggacgtgaagggcttgaactcggtgtagtctcaccaccggccggtgttgtattctgcgaacgttcttgaatctgacgaacaaagctggctttctccgctggtaggacattggccattaccttggagcgcgggatgcctagcatgtctgcgacggcgtgggcggtagtctggttatcgccagtgcacatgaagacatcaacttgacgcttctgaagctgggagattatctcgacagcttccgggcgaatcgtgtctgatgtggcgaagataatagctggtataaagttggatggttcggtggatgggggttgtacttgacgtagtgaaaggactgcagtagactttccagctgactggtatttcgccagcagactggaaacgaaatatgtgtctgtttggggggatagtagactgttgagaagacgttcattgccaattgcggcttcatactgcccttcgtgctcggagccagacacagtaaaagttcctttcatgccttgcccggaaatctcatgaacgtctgacgacttgacagaggaagatttttgtgttttgcagaattcagtgattgcctgggcaatcggatggttgctgctctcttccattttccgagccagagcccatgcgaccttcgcaacttctgggtcactggtcaaaacttcatgttcagaaaccttcagacttccaccctcagtcaaggtgcctgtcttgtcaaagacgattgcgttcaagcgactggcttcttggaaggcttcaccaccaccttttaccaggataccatacttcgctgctaggccgcccccaacgaaaagcgctgtaggggctgcaagggccagaccgcagggacatgccaccacaaacactgaaatggcaaattccagcgcccagaatgtccagccaccatgtgcgacatcgagataatctgcggggagcacaccggaatgaccaagtgccaaccaaataacgaaagtcgaaatggcgatcagagtaataataggcacgaaatgcgaagtgagaagatcagcaactctttcaagaggtgcacgcttgctttgcccctcacgaaccacggcaatgatttggtcaagcatagatgaaccaccaagctcagtaatacggatccgtaccggctggccgacgttaaccgagcctgtatagaccatgtcgtcggctgttttcttgactggtcgcgattctcctgtcaaagagctttcatcgaattggtatgacgcgctgtcgacgatgactccatctgcaggaggcgaggcgccatggggaatactgacgacgtcaccaacttccagcaggtcgacattcgtacgcttaactccatcttcggaagtgtcatcggacaacagtgcctctgaaggtcgaagcttgcccaaagatgtcacagcatcgccagttctggctttactgtaggcctccaggaagcgaccaccaagaatgaacagagttaagaagacaaccgagtcgaaataagtcgtgctatgggggctcgacttggtacccacaactgcgtcaacgataagtaccgccaaagacgagatataggctaccgatgtgcccgcagagatcaaaaggttcatactaccaaaacggtagaatcttcgaaggatcggcactcgacttccaggccgccatagcgcataaacctccttcgcagcacggacatggaacacatcagtgccgtagaacatgacaggagttgacattataaacagcgcccattcgatgcgggtcacactgccagaccacatagtttgctccagatacattcgaacagagttttcagatgagacaagagacataaatacaatccctatgaagaaagtcggaatggcactgataaagacgaaaagcaatcgcgccaacagacggcttctttcatgatgctggatcgcacgagaccggtcttcaatactaggcgggtgataaacagtcgcgcgaaaattgtcattcgccgagttgatcgctgagattattttgcgaacggtaagaaatggtggctgtggagtatatgtgattttgacgatgggggttttctcggagagtgcctcctcgatggtgacaccgggaaccgatttcactgcccccaaaacagtttgtgggcaatggtgacagaacatcccatccacttgtatagagattgttctgatatgggcagtgctgaacttttcggtaccaattttcaatggagagacactattgacggtggcatcgtatccgaggtcttcaatcttctctatgattttatcaagattgtctcggccttcaaattccaccctgccgctatgggaaagcaggttcacagacacatcacgaataaaaggaagttcttcaagtcctcgagtcacccctccgacacaagagccacaggtcatgccggtgattgcaatctcgctgacgtagtttgctgccagctctgcagatgccggtggtttggggacttggttcacctcgtcaagagatgcttcgaacccagcatcattaatttgctcaacaatctggtcaacattatcgcgaggtccaacataaattactgttgcgctgttggtgagaaggttgacagtgattttgttcacgaacccgagttgttgaacctgtgcggtgatgctgttggcacacgacgcgcagctcattcctccaatgctaatctgtgcggtgaactcatcggatgattcagcggacggactaggatgtcttgcgatgtctgtgggtaatattgaagcagacacatcaggttgaacctttgctttggaggtggcgaatgaacggagaccctcctgcacagcatcctctggggttgactcaagctttgtaacagtgatgtcttcttcgtgctgcttgcccaatggtcggaagggaatttgtgaggacttctcgtccaaagatcctagctccgttcgagaagaatgacgagaaaaggtctctagctcttccttcctgcatgcatcgcagttggcaatatgtcgtttatgtcggctcgtctgaattcgctctttaatattggacgagatactagaaacagaggttcgcggcgaggagaagagcgtagagccgcggtgattccaggaagaggtgtcgagttccgcgatgagccttcctcgttggtcaaatgtcgttacatagtgtacttcaaacgcggcatgaatcagcgcgttgacgaggtcggcaggccgaatggcggaactgtggctcgcacgcacttcatgcgtcaaaatggtgacttcgatgttttcgactgtaggagtctcagagagcacttcggtgatatatgcaacacatgatgtgcagtgcacattcgatacaaaaaagacactggtctgggtatcaacctcttgatgggctgcctccagatcgaaagacttggtgttgggttttgatgacatgactgacggagatctctgcgacctaaagatgaggtacagcgtggaatatatcgatcttgcaagtcctcagcagagtcgatgattcaatatcgctcagacaaggttagaaacgggcagttgtcgggattcagtgtttacagagcggcctgatatcaaggtgaagggaagagcgattataaaactgggcagggaaccttttgcaatgcagtataatattccactaagaaagaaaagaaagggaaaatcctagaagtgggtggctaagtttaaacatggcgaagatgcgccatttgtgcgcgattcctccaaaccacgcacaaataccgcattccagacatgtcgaccatgacccctgtgaccactatgtagtatgtcgctagtgtcgaggcaggcaatcaagaatgaggccggattctcgtattcgacgttgtaaaagcaaccacttcatgtggagtaccaagtctgatgatgctgttgcagtagcagtcatggatcatctaggaacctcaggcaccgaggcgcgacaaagaccagacggttctaagcctaattgggctagcgtaccctgagccaattaaggtcacgtgattcatgaatggaatccatcagatcagccatggagcaggagacaagcgacaagagataaaggaactgaactgaatcgagcgatttattcatttatacctgactcactcactcctggttcccgacatccaatcagctagaacttcaagtcgtatgtccgaattcagctctgcagattccggccaattacataagcaggttgaatacttttttctcaccttccactttcccttatcgcgattctcgtgacagtcgataaacccttcgctacaaaaaaaaaaaaagaggctgcgcgacgtccagttaaagaattctgaggctgtgaggactcggcctccatcgagtgcccctgtctacattcaatctctgacctcttacttttcgctttaaccaacatgtcggcacccagatccggcgcgcgtccaatccctccccgcgggccccggcctcctatgggacgactggccagtctaaaaccccccaactctactcctatcaatcgtccaacggctattggacgctctcaaccaccccgcccgacaacacacccgaaaacatctaattgtccaaacccaggatgccctgctccgcatattgtcgatgatggaggcgtgagggtctgcacgggctgtggtacagttatcagcgagaacaacatcgtctctgaagtcacgttcggggaatcctcgtctggtgcagctgttgtgcagggatctttcgtcggagaagatcagacacatgtacgcagctatggtccgggtttccagcgcgggggcgccatggagagccgggaaatgaccgagcaaactggaaaccggtatatgcttcaactttcccgggctttgaccatcccggagagtgcgaccaaagctgctggtcaggtgtttaagcttgccgtgggactcaattttattcaaggtcgtcgcacaaagacggtagctgcggtctgtttgtatattgcatgccgtcgccaaaatggcaataccgtcatgctgattgactttgccgatgtgttgatgatcaacgtcttcaagcttggtcgtacatacaaggcacttctcgacgaactccgcctaggtggcaacgtctttctcatgaaccccatcgaccccgaaagtttgatttatcgtttcgcgaagcagctggaattcggaccctctctcatggcggttgctggggaggcagtccggatcgttcagcgaatgaaccgcgattggatgaccaccggtcgacgcccagctggtctctgtggtgccgcactgattcttgccgcgcgaatgaacaacttccgccgaaccgtgcgtgaggtcgtgtatatcgtcaaggtgacggaaactactatcagccagcgtttgaacgagttcggttccaccgagagtggtgaattaacagttgatcaatttcgttcggtccaattggagaacacccacgatcctccatccttcactcgcgggcgagaaggtcggaaaattcgtatcaagaagttgccagagactgcggcggaactcgaagatgatgactccccaacggaaagtgaagcagaatcagtgcagccgcctcgtatagatgccgacggtttcgctattcccagtctccctatcgacccggctttgactgcaagtagcctcggtcgacgtgcatcaataatatccaaggcagtgaatgaagtcgttgaagatatcaggaacgagccgatccactccaagggcaagggcaagcgacaacccacgccagaaccatctgccgagcaggttgcatctgaagcggcgctggaagatgaaatgcggtctatgcttgcccaaggatcatctatgattgagagcgtcggctccgaccaacccccgcggccgaccgtttccgacagcactgagatcgatgctgccgagtttgaagatgaccccgaagtcgccaattgtctgctcttgcctgccgaagtcgagattaaggagtccatctgggtgacagaaaacaaggagtacctccgcactcaacaagcaaaagccctgaagcgggccctggaggagtcaaccggcgggggcacacctcgcaaaccacgcaaacgccgccgtggccgcctgggagatgtcacctatctggagggtgagggcgaagatggccgcagctcccgtgcctcgacaccggctgaggcgacacgtcgcatgcttgagcgccggggctacagtaagaagattaactactctcttctggacacattgtatgggggtgaagggggagatgcaaagacacaaagcctgagccgaagccaaagtcgcagccaaagcgtcgtctcacggcgcagcgccagcatcgaaccccaggcagccacacgatcccggcgtgcaacgccatcagatgccaaatccatccgtcctggttctaccgcaccactacctactccgccgtccactgctccagataccattcagggtgcaaagccgctcatagccaaggatgaccccatgaacaagcttgggacagatcctgaggaggatgaggatgaggaggacgactatgatgacgacgacaaggatgatggcgtcgacgacgcatttgcaggcaattacgaaagtgactatgactatggcgatgatgatgactgagaaagcagacctcagaagtccttacgagcattttgtcatatgtccttttggtggattggagttgtgaggatgcgatcggcatccacttgctttctttgtcttctattttacggccttcgagatgataccatgtacctatttcacccatatgagcattggggtttccaaatttaattatcgtattaatatctcacggttggaattggcaccttgctcggttgcctcgacgtgctctaagcaaaacactcgctgaacctgagtagtatcaagctctagcgcaccaatagtaatgatgattatcattataccacaccattttcccacctatttacctttcacctattccatgattgtaggtaaatattacttgaatggtcaaccgtgccaccactagttaactacatcatagttcctgctttaggtaatgtagcttgactgagcatggtaagtattcggttccttagaaatgcccgcgaaaggcaccaggtcctgagtttagcatctattttgggtttcagatactcttgacataagcaggtgaggtaacaagggaagttagaagaatagactgagatgagaaatctaataggtaccgacgctcttggctgggtcacaaatgacaacgggcctaggaagtcaagagctgtcgtcaggactaggtatcaaagtgggcttatttaacgaccaggaacatgtacttatgtacatctgtatacctcctgaatgctagtgaaagcaatcatagttcgtacaaccaatatacgaaatcaactgggctggctctaggtgatttgttcttaggcgtaggttttcccctgctataactcgcataggtgtataatacaaggaactcgggtttattatggtattcacgccagaatgatttcaatctttttgatttggtgagatagatagtcgtaaataaataacggttgtcaaaagcatgttgaagaactcccagattacgacgccattttccatgaaagagatggaaagcaaaccacccaaaaccatcaaactctccaccgggcgggaaccgaattgggccggactgggtcagtcaggagcgtgagtctcataactaaataagcaatagtgaagaaatcttgagaaaatgtttttaaaaaaaaagaaagaagagaggaaaagaaaatatgatagaacagtcggaaagaagaccgagatcgatcgcggattggttggatgtcgagtcatcgggtcggatcggtcgatgtcgtcggatggcacgggattgagaaatcgaatgcatttttggaagaagttacgagtcgatctccattcccatttccgcgcctccgctcagttcgtcgaggctcgatgcttgcgggttgttggacagggcttgttggagaagtggcaagccagtgtccatggagttgaaggagacaggctgtgctctaggccggtcggtagctccgaggggagtagagccctcgaatatgatgggggagctacgaaggttttgaagacatccttcccaagaggaggcaacgagctggccttgagtgaggtcttcggtgaagagataaaaggcaggcaaggatccagaagttggagtggcagccacaagataggcgttcagagcgcggcttttcataagcatctgggagccgtgcaggtgggccgagtattggttgtcgatatacttggtccagccacgaacagcaggcgccatgtcaccgtcagtgttgacacgctgccagccgatacctaggagacgagtggcatcatctactaggggctcaacgggcggggcagggcctgcattgagagtgcggtgctgatcgttggacctagggtcgtccaggcgttgacggatcgaggacagtgcaatatcatccagacctggtgcagatttatcaaggcgctgagacttgcggcttacttcagcagcatcagaaagcagcgcgtttgaccgcgaggggacaggtgcagcagcagcctgttgcgcctcagactcttgttcataccatgtgccggtttgactctcggcagatatcgcaaggccagtctgcgggtttaaaagagccatgccttctccatagataggccggaccttggtagctggcaccgcctggtgtgccagaggcgcgctgggagcaacggcgtcttcaaaagtggcctcatcacgggatcttttgcgggagggcttgggcaccgcaggggcagacgataaattgaagctcgaggggacagacggtgtagagctattgttggtgaagacagggctggtgtttgtcggatagctgttgaagctccctggggagtcgaggaaagaggactgggagaactgagcgaaggcgtgttcccggggaggagagaggaccgtgaccggcccgtctgagaggcgattaagaatcattggagacattgttgctcggaatcgtcttatatttaagccaaagggaactgttctgttagattaggtgagtaagacacaagaagcttcaaccacctgtggaaagacggaagtaagagaggtaaaaggaggaagatatctcggtaagtaagtagaagaatatatatagatgagggagaaaggtgggtttgagagaaaagagaaagaattgggaggagaaaaatgggcgaaatgggggaaaaggaagaaagtcgagcgaagtaagagtaagagcaagggtaagagcgtgagacaggaaagaacgatctgaagaagtggatgaatcgatgcgcgaaatgcggaggtaccaagccgaacggtaatataccagcaaaaagcagctatccgatcggccgtaacggtaatgatacgtgccctattaacgggtactattggctcatgcagccaagacctcaagtggagtcgaggtggatgggtccaggccagaggcgatcggcctatgaggacggacctgtcgcccgcgaggattacatcacgtgaaattcataaaagacgcatacatatatcacgtgctttatgtgaggtcatataaggttcaagtctattgagatactataacgacatgatgggaaaaaagaaaaaaaaaaaaacacaacgaccacaagatcaggtccaaagcaaaccgacaccagagctcgtgcaagtttaccatcaatcaatgctcgtagaaaaaaaaaaaaaaaaaaaagtacactgccaacaacaacactttcatgtctttgtatacatcacagaaatgtggctggaaaaagaaaagattggtaataaaacagccaaaaacaagttcctcctttctccattgcacctcaggggcccatagagacaaaagtatgagcggcagtctctgcatgtaaccgagagacgggaaggaacggatacccgctacataactgcacttatcctctcgtgctgtcgatccgagaatggatattgtggcttcaaacactgggtcgggttttcggtgttccaattcataagacggaaaaacaaggatctgataagtgcacttaagcattaccagcagtagcaccgccaaggtagcccttgacacggtcaacagagtcattggcgtagctgggagccatagagccaacgaagaggaagaaaataagagcggcagcaccaaagacgacaaatttgcgctgcgcagggcggttgttgccatagtcagcccaggcacggccggcagacgaagtgtactcgcgcatcttgtcgccgccaagcttgtaccaaacaagacctagtagagcaatagaataaccgaagaactggaggccagtgacgggagtctgccacaggaacatggaggcagcaaccaataggatatccttgaggacaccgcacagagtcatgaccagggaagaggtcttgccaatctgtagagagtattagtaacgcttccctcgggagtaagatgcgggttgctaaagtatcacttaccaggaaaacgaccgagacgttgagcaggaaagccacaacggcattgagaactagaagccagataccaacggagtagacatggtccatggtgacatgggggaattccaagaacagagcaacgacaccgttcatgacggcacagatgggggcgaagtagtacagagaaaccatggggtccatcttaaagtcggcggagctaagcagaccctgtaccatgaccagacgggtggcctcgaaaacgataccaccgagctggaacaggaaaccgaccatgttgaacttgatctcaccgaaggaggcaatgatcacaccgatcacgatgatggagacgttggccaggaccttcatgttggccggagccatgcccataccccaggttgcgaggagaacagccacaggggtggtggccttgagcatttggataaaggcaacgctcaggtagaggtaggtcatgttaccgcaaatcaagctcagactgaacattataccgatagggacgatagcgcggaggtagacacggccggtcatcttgaccttcttgcggccatcgaggacagtagtggtgcgagcgaggatttgggtcataacagtagcgaaagacagatgccatgttgtgaggatgatggggaaacctattcacagcgtgaggttagtgccagtttcctcgcattgtatctccggtctgacttacggaagttggcatagtcgaggaggtacttgttgaacaggataacagtggaactcaaggtgatccatgtactatcaaaatatcagcaatgttctccgatctgtctggttccttccgatgttgctcacgtcacatagaccgcggggtggaatgtaatgcccggctgctctgtcttctccgctgcggggttgacagtaggcaaagactgctcccggggagtctcgccagaggcgcggaccttctcgccgtcgctcattgtaaaggtttgagattgatcggacaaaaagcgcttaaattcaaaaggtcgtggccgggacaggcttccttgactaaatgcggaggaagccacggagaaaagtgggcaagataaaaagggaattagagggaaatgatcactaaaatgctccaaagattaacgagtgcgacagaaagaccaaaaaaaagcgataaataaaaacgagcgtggatgaagaaagcgtgaatgaagaaatgatgatgaaggttgaagggatggaatggggtacgtactccgggagtaatttttttcggcaccaaacattaacttcaatttgggggtttgacggagaaattaagggaagaaaaggcagttattgtaaaggaaatcgacaagaagccaaacataaaacagcaacgacaagaacagaaacaccaggtcaagagagatccactcgccgcaaacagaaagtgagaggagaaggctggtgtatgaatgtctgtacatgtatggaaagattggtatacgaattaccattactccggaccttggttacggctctgctaaggccacctatactcttcgcttataatttctactgttacgtagtggtttcatctgtatacccgttttaccagaaccaataccacttgtactttactagctcttaattttaatttgtgaggccatggatttgctcgtggcgacagtctccgactccccttttccctgaaataaccaccaatcacaccagcctagtcatgggatccactggccctaatcaacacgcttatccttaatctcaatcagattcccatcctaactcatgtgaatatctatataggtatgtttgacatcgacgaaaccatcggcactctcggaatgtcctaaatcaacgggtttgaaattcaaacccgaaacagcgcagatccaaattaatagtagggcattacgcaagcagctgttagccaaggcccaccagaacccgcgttcagtgaccctctggtccatctggtcccttacgggtggagaatgcggcgatccgccctctgtctgacgcaatcaggggacttccagccccccacaagcatattgtgcttggaccagtggtggtggggggaggagacccttaagcttttggtgttaacgggagttagtgtttcgagcggcaattggcaattggcaattggcggtgtttgctggttcgagaagttgttcgtcaagggggcgatcaatgggatcggttgtttgtattactttcttaggagtgacaatcagtggaaccagatgctggcattttgtaaatctcgcttctcatcgagaccgccagatgggatgatcaactctgcggatgttgctccgggaggattcaaggtgtttccttttaggacggtcctattgtattggctatttgatgcatgtgagacacagggacagtgtctggtgtactccgtacatcgtggtacaatgtatacacggggaaatcgatgtgatgaaacatggatcaccatctttaataataagttcaagatagcctcgtttggtctagcatcacccttgatggaggtccatacaaactacggagtaccaaagcaatattggcgtcctaatttaaccacagccaacaatgtaccaatgcctacatcggtggcgtttttagcccggccacatttgatcgagattcaatggttgccccctatccatacagtatcgcccctttttctctgttttcttttttttaattcttctagaataatgttctgacctgggattgatatgataacgggcattccagaggggagatactgaatgctatccaatacccactaggggaattctaatatcgactcacccgcatgcgaaaagtaaatgcagattccatgcactccaggtccctgcttttggaggtatcatgataagcttaagaccaataacggctttgcgctaaatgtgatgtgttcaatcttaaccagggtccttattacagcgtggtgagatgagattgccttacgcgttcttttactccagattacttgcctcttagattgagccctgcagcactgcctccccctgagtacattattgtaattgtaattgagcttgtcgatgtgatagggcctcgggagggcctggatgtgaggttaaaaaaaaaaaaaaaaggaaattaggccataataaaaacagggaataacaaatcataacaaatcaggaatcaatatcaatatcaatcccaatacgaatcagtaaagctgaaacaggcacgtcgtctccaccggatccgtttaacccacaaacccaggtgcgtctagatacccttagcttggccggtcacgttgtcctcccacttccccttcttctttggttcctccgcttctttgccctttattatccctccattccctcttcatcttctgcagattcctgcagctgtgcttctatgctgaacgtcgcccgcaagacattcaaacgagtccccagttttcaggacctcctacaaggcagaatgacccaccctgacatgtaagcacttgtccacccatcaacatccgtcatcgctgacaattgcttcgcagttctgttgacgttctcgtcattggtgctggcccaactggtttgggtgccgccaagcgtttgaaccagctcgtaagtctttcgctgcttatttactgtgtgggagaggggcacaaaaaaaggggggaggggtatccgggaattgaaaaagctaattgagtatacagaatggcccctcgtggatgattatcgactcaaacgagacccccggtggtttggcttccactgatgttacccccgaaggtttcgtaagttgcgactcggtctcaattgtcagtgtcaacactaacctagttcacagctctacgatgtcggcggtcacgttatcttctcccactacaagtacttcgacgactgcatcaatgaggccctccccaaggaggaggattggtacacccacgagcgtatctcctacgttcgctgccaggaacaatgggtcccctaccccttccagaacaacatctccatgctgcccaaggaggagcaggtgaagtgcattgacggcatgatcgatgctgctatcgaggcccgtgtcaccaacaccaagcccaaggatttcgatgagtggatcgtccgcatgatgggtacgggtattgccgacctcttcatgcggccatacaactacaaggtctgggccgttcccaccaccaaggtaagtcttgacttcacgtccctgggacggaaacatgctgatcgatgatctttagatgcaatgcgcttggctcggtgagcgtgtcgctgctcccaacgtgaaggccgtgaccaccaacgttatcctcaacaagaccgctggtaactggggtcccaacgctaccttccgtttccccgcccgcgatggtaccggtggtatctggattgctgtcgccaacactattcccaaggaaaacacccgctacggccccaataacaaggtcgagaaggtcaacgcctacaacaagaccgtcaccctcgccgacggcaccaccattggttacgagaagctagtctccaccatggctgtcgactacctcgccgaggccatgaacgactccgagctcattcccctcaccaagcagctcttctactcctccacccacgttatcggtgttggtatccgtggtgcccgccccgaacgcattggcgacaagtgctggctgtacttccccgaggatgactgcccattctaccgtgccaccatcttctccaactactccccctacaaccagcccgatgcctccaagaagctcccgacccttcagctcgctgacggctccaagcctaagagcaccgaggctcaggacggcccctactggtccgtcatgttggaggtctctgaatcttccctgaagcccgtcaaccacgagacccttcttgccgaatgtatccagggtctcgtcaacacccagatgctccagcccggcgatgagattgtctccacttaccaccgccgcttcgaccacggttatcccacccccaccctggagcgtgagggtgccctcacccagattcttcctaagctccaggagaagggtatctggtcccgtggacgcttcggcagctggcgctacgaggtcggcaaccaggaccactcctttatgctcggtgttgaggctgttgacaacattgtcaacggtgccgttgagttgaccctcaactatcccgactttgtcaacggtcgccagaacaccgagcgtcgcttggtcgatggggcccaggctctcgccaagaagcagtagataatgaccccttatttctttttaacttgtcccaccattcttgtctgaagtgaagggttcttttttttcctccattttttgatacaattgaaacgagctcataccgtcatgggaaaattatacacgagagagcatttgaagcggcatctggaagacgatcgatctttgttggcgtttcatcttgttacttaacaccatccaacccccttcaccctatcatctacctattattccctcttccattagccgacagccgggacttgcttttgatacacttttctagactgccttgatatgtgctattgctcattttaattcattcagttgaccgatgaacctcttccctttctaaaaatgcagtggctttctcgatacttagcacgtgacagtgttgcacgtgacccatatccgaccgctgcgacgtgctaagcagatctcaccctatgtgggcagagtgtttcgtggcatttctcaccccaccaataccattgctccctccagttacactcgccacaatgcagatcaccaaccagacaatcactaacacacacaccgcgagagcctatccccatgtatatccaagccatgtccacccatgaacctaggaaccaaaacccctgaatggcaggcccctggattcgacacaatcaatctaccggcaaatgccgccacagcgccatcaaccagacacggaaatataccggaacaaggcagttcaaggttattctacgcggtggcgtagtggatccgcgcgcagagaacgcgggtcaaccatgaaccaatcgtatcgaggatcgaaaatgtacaatctaaacggcatttcctgcaggcaaaagcaaagaaaagtccgagtacaacatcagcaaagtacctcagcaatgcagagtgacgtaggtcgggggtttaacaccattcttgtggtgagatgtgtcaatggctaaaagggcactgccgaggccgcgtcagatctggaggcaagccagttttgtggttcttctccactgaactattgatagatttgggttgccgatattgttgtttcagatatgaattgttgactgacattccagatcgcttcttttgcattttaacgtgagacattgtaatctggcccaaggcttggagggttatttttgatatttcttgtggtatgttcaacatgtctgggactgcttatgtgtgaggctggtttcaatatctcatattggtaattaaatattaatgcatacttccattgcccgtatagtcgatcatgaggttttggggcgagaaacatcataccataaatatacagaattagagtcgacaggtcagtacaaagccacaggtatcggtagaaaccccgctgggacagctcatggtggactcgaagtggccaaaccgccggaggaaagccaccaattccaagcacccacacgatctcttcatagggctcctatatggcgattttagtgtgagagccacagtcctcgctgatgctattggccgcactggcaggcgaaactgcttcatcggccaagactgcctcgtaaggcatagtggacgctaaggttaggtcccggggtgggacacttgcggccggacttgacgacacaccgcacgacaagaatgaaacctgcggcgtcgaggctggcgagtcaatggacatgggtgtatatatagcatctgtgtggcttgggcggtggttttctccgtgactaaattgaacttccggtgattcgttagatggagcaggtttttcgacttcgggagtttgacatacttatctcttcttcaactgccttaccgctatggagctcgagttcgcaggcctgcggtgacagagcaaatttcaccttcagtcgcggtgggtcaacaaatcggtctgcttgcgagtacactccgatgggaattgtcacttgtaccgacgagtgttgggttggatatttgaggcatgactttgacacagaagagtgtagaattgcatctgcagaagcatggctattgtatcttggagatgtagactcaaaacatgacccgttttgactcagccctgtggtatcaatatccacatccgaatccgtagagatacaggagctaggatatgggtccgtttcgtcgcagctctctaggtgcagctgctcgaattcgacagtcagggtatgacggatatagatccgctggaggtgagattcaacatccttttcctccagggcaatgatggttgggggccgtctgatcatgtttccagggatgaatgatgatcagtcgcacgaaagccctggagcctggaggtcccgtatatagaaacatcgtgtcttaggaagtcacgtatcttcacaatccaagaaacctcgaccaggatatgcggccgagaagatattgcaatcgcgaatgcggcgtagtccctaaatagtgaatcagcaaatgcgatagatgcctagatgatataaatcctatcaatccctgaatctgtgcaatataaatggtgtaaatgtatcccatcgactcgaaactggacaaatcagacatacccattccatctcaccactgaaagggattaaaataacatacagatatctttttttgtactctgaatctctctctccccctctaattctctagggaaagccctggagggaatattaatagtcaagtcaggctcagcccctcgacactagacccaatttctacggagcctcctgttgatccttccccctctctccagcgtcgactctctcacacacacacacatacacctctctctttcccccaactattcctcggatcatgcatccgctgcgtttccgatagcctgtctttcattgaccttttcgaccttgcttcccctgaatacctcggcacatctccggtcgctgccaaacctcaaatctccgccatgaacggagatctcagcctgtcccagactctgggagggcttcggatagccaatccagacgattcgcctcccccaacggaggatgcgaccggtgggtcaacagactctaatccgttcggagcgccggacggttcggtatcaacacaacacaatcccgcacatgacgaacacacctctgcctttcctcctgcaaccatcgaagtcccggtgacagacgaccgtcagacttcattccttcaaccctcccccgagataacaccacaatcaaacacatatcagccctattcggctccatccctctcaacgcctccgaatcccaaccgacccctttcctccgtatacgtgaatggctcagcaacctcggtcctccaccgtgagaattcatatcgcatccgaacagattcgggtgcttcatccaaatctgggtctcaggcgcgcttagacacacgaggaggctcgtcggcattacatgccggtgtgctggcgcgcgacaactcccacagcgaccgatcctaccggaccgcgcagattccgggcaacggcccggcggtgatgcgtcagtcatctcgatcacaagcaagaagtggcggcgcatctcagatgccacgaacggcttacatgccagaaaacggcccaatggcgagcagcgaggattggcaagaccgtggcgccgcggtctctgtgagaaaggaggtggatgccaacggccaaactgtctctcgctatatcaagaaaggcgttcgagacttctcgtttgggaatactctcggcgaaggctcctacagtacggtcgtcttcgcaacggaccggcagactttgaaggaatacgcgattaagatccttgacaagcgacacattatcaaggagaggaaagttaaatacgtgaacatcgagaaagatacactcaaccgcctgaccgaccacccgggtatcgtgcggctatattataccttccaggatgagcagtcattatatttcgtgctggacttgtgcaaaggaggagaattgctcggtgttctcaaacggatgaccacatttgacgaggagtgtacaagattctacagcgcccagattcttgacacgatagactacatgcacaagcgcggtgtcatccaccgagacctgaaacccgaaaatgtgttgcttgacagcgggatgcatatcaagatcaccgatttcgggacggcaaagatcctcaagactccacgagttgatcccagttcaaatggcattcttcctcttgactcggccgagcttacacaggaagagcgggcgagctctttcgtcggcactgcggagtatgtcagccccgagttgttgacggacaaaaatgcatgtaaagccagcgacctttgggctttcggctgtattatctaccagctcttggccggtcgtccaccgttcaaggctgggaatgagtaccagaccttccagaaaattgtggcactcgactacgaattcccaattggatttcctactgttgcgcgtgatcttgtcgaacgtcttctcgtcctagagcctacccgacgtcttcagatcgaacacatcaaaaatcatgaattctttgacggtatcacatggggtccagatctatggaaacagaaggcaccccgcttgaaggcctatgtaccccccgcgcgcgatcccatcaagcttaatgacagtaaaaacggggagagtctccctccagtcatctccactgcaccctcgaatgcaaatgccagttcccgtcaccttccacgagtggtaaccgagctacccccgccgagtcagctcgatatcgaatggtcaccagtactgaacaaatccaacgagcggatcttaaaattgggtaatttggttgttctgtcttcggctgcctcgcacagtccgtcgtccaagaacagtagtggcgagtttgatgcaccccggaagttctctcgtttcttctcaggaagcgccacaaagaaacgacagcggttggtgatggtcacatcatccgggcgaatcattctggccgcatcaggtggtgatgataagaagataaagctcgagattcccctgcttgctccggggacaagttacagaagtacgacggattctaaaggaatttcatcctggattgtggacacggtatgtacttcatcctttatcggtcaaaatgacatatctaacgacaccccacagagagagaaacattatgttttcgaggatcccaagccatccgcaagcaacgccggcgccacagcgatccaggtacaagaatggctggacgcattggacaggtctcgggagatgtcacaggaacaaagcgcaggcttctccgacgatgcattccgcgacctttcctctgggttccctagtcccgccaatacgctagaccgcacatctgacatgcagaaagacgatagaggcccaccatcatctggtcggaatcacctagtgaaacagcaggccaccgatagcgagtcaacgaaaggaaggaaacgatttagcaagcgacattcgaagaatggtctcgctgcggtgttctaatgacatcgaataagaacgacacatattgcgatccatatatccacgtgccaattgcctttcggttttgtcggtttgataccgactttcttatactacctgccttcgcacctcgctatctcaccatttgaacacacctccacctgtctccccgcgtctctttttttcatttctcttcccatgcacgggcattcgcacaaagatgggttatcatctcagcgtatcggttatcctaccctttgcatattccagtgacaagcgtgttcttctgtttgtttgtgttctttgctggggaaacatgtttcttgcatttagatctggaaaggagcgcatactttttttctttgcctgactgcctatttcagacagaataccgattttcctttcccttgtcgtttgctatgtcttccgctgttatatatccctgatttggcctgaagcatcacaacatcgagcctttttctgttcggctattttcatttctttgttgttcctggtgagttatcaggctttattgaggctgacttattgattatctttgaaaaatatgaaatcaagactgatacgcccgcgtcctcattcccctcctcattttcttatacctcttggtgtgttgttttagggcaaatttgcacaaaagaatactttccttgcttcgatatcgtcatatctctccttgtgtctcttgttttccttggtccccaggttccttacagtggcatcttggtttggccgcattttcattgtgattttcttgctcgcttcattcctcttcgaattccatcctttgtctcccctcttagtattttctttgctctaggctgagagatgatatacccgattttcctattccgaaatcattattcaaccgtcttgctacaattcttatatatgttgaaatccataatgaaatactgcgcattccaagcagagtgatcttgaacaatgtacagtttgatagataactatatacaactaaggagacaaactagatacaagtagacatcagtcataagcgggagacccgtggacatcgtcccccagattagatgaacagccagtcgaggcttgtatgatctagctcctcaatccagtcaaactcaagatcagaatcattattatcataaccattctgatgctcacggcgcttgagatcctgtttctgccacatcagacgcaggacccacgcagcattgcggacattaacactcgtcatggcctcatagagtgaaccgagcttttcaaggataagagcccgctgcgaagggcgacactccgcgccagcaatgaaggtgggccagatgagacacttgaagtgggagtccgaaggggggatgagggagatttgggtgatgagatttgtggcgatgagtctatggtcgggtgggaggccgacatctatccatggaggcgagaagccttctctggtgcgcgagagaacacggcttgtgtagaggtagacggcgtcttggtatgaggttgcgagtgcgagacggtaggttaagtttgggatgaagaagacattttgcatctcttggctccatgctaccgggtcgaagtcgcggattccttggaggaggctggcgaatgagtctagggtgaggggctgaccaggttggattggggttggcagcgctgttggttggtgggtcatggcggcggcttcggattctggataccagagggcgtggacgaagaaaatcactcccaggagataggcgggacatccgacccaagaattttcctcgaggcgcttgaggatctctgggcccatggatgaggagtagaagggctttgagagcgcgcctggccgagcgagcgttgatcccatgatttccattctgtatggtcagcaagaactcttcgctataggcagagacccgaagcttacattaaacacccgtcaagggcaaaagcgtcgaggtcatcgagaattccttgtcccgggccactttcagggcggtccttgagaagcttcttcgcaccctcgatatgataactccaggccccgctgccggactcgaatatgtctatgaaggcaagcaatacgatagcagctaaggtcctgccgtccttctgcatcgccgggttgaggagatccatggataattggcgaagggcgcggtgcttgtactccaagaaatgatgataggcctgcgaagcgggttttcgagaacttgccggtgcaacaatatcttcaatctcctttactgacattgatagattgcctgatgaccatggtaggacagatgagtccgattctgatacaagggagcaatgaagagccccaagagcagcgatgctgctggcaagaacaggagaatgattgaccaatgcagtaagatctcggaacggatttttgtgttgggagtaaagggcgaagtcattaaccatatattgattgtcttacaagtaatcgtcagtggagccacagataatgcactggggaattctcacagtgatgtacatagtaccttgagaactgactgagatctttgagcagtggatctaccagtccccatggcgttggagtatagtcagcgggaggagcgccccgaggaacatgaacaactgcggtgtcctgttcctcgtgtgtattgacctccaagtgcgcaatttctcccccgaatgttggattttccgtctcaaaagtccatccatcggtctccggactaggctgtttcccagagctgtgcgattcggcatcggacgaggattcggggatagagaaaaagccgaacccgctgctcgctgcagtcgaatcatatatatgcgtagctggctggcgctttggcttgctaggcggtattcccacgtcatcaaagctgcggcccatcatctttcctcgactagccacaccacccttgacccaaacaagcggtttctgataccccagacattccttccccgcatctcgacacttccgacaggtgggttggccattgtcgcagataatgcgacgtcgtcgacaggtatagcagcctttggtcattctctgggcgttgtgagacaaacgtattttctgaactgggtagcgaagaactgagccacttgtgaagtttgttcagcgccactctccatcatcggtaatggtcaggattcggaggcaggatgtcgacaaagccacacgaccatttctagtcgtttaggaagtgactctggcgtcgacaaatgtcataaaccaagttgtcaatccgtcatgctccacgatctcttggatggttcagagaagcttccaaaatttgcggggaggatgactaagataatcttccgacgatcgagaccaggactgttcaagcttcttgcatctcaaccttctacttgctcttccatatcagttacacctgaaagctcatggtcgaatgctagaagaactacaagatggttttgaatctcttgttccgaagtctggaggtaagtgctttcgccttcgccactccgatcttcactgacattgttcgaacttagatctggctcactgtccgagtacgttgctccaatattgatgtatttttgcttgagcttgcattctaatacgatctacacagctccttcgaagtccgatcttccatcgtatggtgggccgagttcaccagaaagttcaacatattaggtacggggtgcctccggaggagcagggaggcactcatctcgagggacaaggtatgcctggtacaaatatttggtgacatagtgtggctgacctgttctgattagatatgaagtacaaaaaattccttgagcatttcaaggaagagctgaaggaccagatgaaaggaaacccgcggaacaaattttaataccccggcgcttgtatgatacgaaaactgatgatacccacatgaaaccgatacatattatatgctttgcttttaccttccgaaaatctggatttgtgcttcctatcatcattttgacccttgtgtcgacaccgggtatacagtgggatacactttcgcactccttgggttgcatcccttgtttaatccggagaatgaacttgatttgaatcattgacttgccccttctactattcccggctgtatttgcagtcaggctgggatccaataactggggcatatatatcgagtttcgggattgctctgaaggatgcgctgcagtaaccttggctacagacgcaatcaagattcgtcgaattgctatatttacatgtatatattgttgctaatttcgtgctactgaatcaatcagcaaagcagattccagcgtgtctatttcttcaaaaaatatgagaaaaagtacagtcgcgatgaatatcactttgaaccattcttattagtctaaatgactcgccgaataccaatgcaagccgatcatgctgaagccgaacccttcctcggtcttggggtcacttttcggtgattcacatccagtcgtctcctcataactcgaactcgggccagctcaagtgaattcttcactctagccagaacacgtcgaaggacaattggtctggcaggcctccagaagaccttctgtatttcccgggggctggtccgcatgaatatgacctcaaccacctgcagctttccgtctctcgggctcaggctcggactctgaattcgtttctcttttttttcgatgttggtaaatgcaacgaacttgtgtctaccaatttgctcggtgtgtagccaatccagctggttttcattgccgaagaaggtcacggagagcatatttccaatgatgttcaaataattctcggtgtcgtactcattggagatatcggcattggaatccatgttgttcttgatttttctgtcggatagactagttcacgttagtattcgttgcaaacttaaggtggggtacagatcagttgggatggtactcactgggcgacaacgtgtgtaatattcgagagattgtaatccttgaatttgctttcgtatcgaacgtcgagggcgggaagcgaggttgtgatatcttcgggagaagagtgtatatcggccatgtttcttttgagttgggtagacggagtgtggaatagagtcgtatggcatacgctaattttggatgtgctaaaagctctaaatgtcgaatgaacgctgaatttgctgcagatatgctcagtggagctgttatatgcaaggttagtgaagtcaagttgaaataccagacaagaagaatatatttatattgagagctcccgaggagcaaaaggaacaacaaagagagactagattcatagtgaaatgaataaagaaatcataggtctggaaacagatcaagtcgcactatttccatctcactgcatggctattatgggatatttgccctttgtcgcccttggcgaggaacgagagctgccacttgttttgagcataaagaaagatccaaatataaggctgctatacttttcaattatgcagcgctacaagacggagtcttgaagtagaggctccgctttgtattacccctttgttgtcaagacttcaaacagcttcttgtcgatcgctcggctctcgagatgctaggtgaaggaattctttgcatctataatgatgaggtctcggtataatgaatcagcggtagcttttgctaatctcatagggggaatgttgggtatcagaagcatctcgacatctccaaataccctcaagagccgggaccatcatgtcgccaatttgacacatagtgaaggaatactccattcaactactccgtacttaagattagagctacgtatatgcggggacatcgaataaggggaagattcgtagtcagtcagtcagtcagaagtaatagtcgactacttcattgaactaattttacttactccgcacattagcctcaaatctacgcagtgaatgcgaaacgtttgaggtcaaccggtctgttaacgcttgtcggaacgggcatcgatacatcgccgctcatcctagggcaagagtgaaagaaaaacccttctacaacttgcattaccgaggtcttcccgaggtcttcccaacatgtctgacctgaacaacaaataagcagcccttaagtggttccagaagaggccggaaccccgaaattcaggctgtcagcggcacgccacatggaccaattggggttaggcgcaaaggactccagtttccaggtcaactccggctgtgtcggctttgtaaaattaagagtcgaaagggggtccaggtactcgagggattcgtgctacctgacacagcacggaaatccctgcaggctaggtatttcgcaggaagatgacaaccgttgattaggcgactagtggtgacagggtggtattgatgcaagatgtcatacggcggcttgatgaatgccaatgatatgtggaagatcagaggcagatcatgggagatgtgctaaatatggagggggcaagcgggaagcgaggggtacgtcgtcagacctgttccacatgttagattcctctttggtggtatatacaacataggttttgaggtcattctgcttattcacttattcgctgaattctctaactatggtctcatatgtattcgactgtgaaaaaaaccaaatctaaaataaaacatttgcacccacgggacaaacgtctgcgcgacccagtcgactccgtaccgtgtttcctattgcaggatcggccaatcagcggcgcaggtgcctcggcgcgtggatctggtctgagactagggcggccccattcggcctagctccctttcaaagttcgggacaaacacagcccaaaggctgccttttcgctttgactcctttttcattttcctgcatatccgacctcttttatcaatttcttgacttcgggtcaagtcctttcgttctgatactcacactcgttatccccaaccatgcgtctctccagcctctcgctcttcgtccaggctctgctgttgactgcggtcgcagcccagagtgggattgtttccaatgtcgtgtcggatctcacaactgagtccacttcatccacctctgatgccccgaaaacaacatcgaccgctgaatcaacttccacaacctcggaagagacttctacaacggacccaactacttccgccgagcctactagcaccccgacttctaccacctccaccgagagtaccactagcgctgatcctaccacttcgaccacttcgaccactgctcctacggctgatcctaccacggattctaccaccgctcctactaccgctgctaccacctcagcagagccctcctccacagcggaggctaccgtcccttcaaccacttccaccgctgattccacctccacgtcgagtactggaggcgatagcaccacttctcagagcaccactaccacccagaccccggtcgtgaagaccatcacctcctacgcgaccagcgatggatccaccatcgccaatgtagtgaccaccacttccacccccgttgcttctccctctcttaacggcgacaagagctccggctctagcggtgtgtctgcttcggacaagaagatcatcatcggtgtcgtggtgggtgtcggcggtgccatcctgatcggtgccctgggcttggtcttctggagaatccacaagaagcgcaatgagcgctacggcgatgaggacgatctgatgggtggcaccgctgtgggctccggtccccgcgaaaaggcccccagcccagccggcaacacccccttcaagaacacactagaccagtaccacaaccctggtcccgtcaacgcggcgtctaacttctaggtctgcgttgactcgacacttgtcgaagtgtaaatcttgtacgatcttcatgcttttctcaggcgctatggacagggtatgcgagttcacggttgcgttcttcggttgccaaattgcttctcttttttttttttgggcgtttgacaccccactccattcattctagattgaatatctgcgcatttttgagcgtttttgtttcggcaaccaccacattccttttctcgcgatcgcgactctcgatccctgcgtgactgacaaaaatgcggcactacttttccgttctgcctgttgttctattttttgattccccgtatctaagcaattagtttcgtcctatgacgaacctccattgtgccttgaccaatattttatccatttaccttttgcagcatcggacgtcacaagttgtatagtgttgatagacgtgtgctgcaaaggtcccttctatcttgatctgtatgtatgtaattcaaggcaaatgaaaccaaccagtgaacccattcaaagtattatatgtcaactagtccataggcatcgatcaatccatgccgattaacatccgcgttgttccggaatgcgagatgttctcagattatactctagagagagttattcagttgttgatggtaaaagacaatgtaagaaacattaaggtcaacggacaagggtattgttgaagcagaagctctataaggcgagtacaatggttgcatgaggatcactgccagtttagagataatcagcatttgggttgccaaccctagcgactaaggaaggtttgaagcaaaaccagtgtggacttcctatttagtgtaagtttcgactatctacgctagatcagccgggtaaactatagagatagcacgatctatgtacggggtacatggtatctcatcttccccgcatctaatctaccatgaggcgttcaacgggtataaccgccaagagatatgcgcccgctgccaagaaatccgctacaaccgcaatatggccttgcgaaattattgttcaaccagccaagcaggcaaagtatagggaggagatcctaaaataaagaccccaaatcaagcaagaatctaaacaattataaatgatgtcattgaggcgcccagctgtggacttacggtcaccctgggcataagctgactcgaaggaagcgtataatgaagtccttcagctggtgtgggatacataagtttctcctccgtaatatcatactggactgatccccctataatagataagcagatccagctcatctttcaatatatcaaagaaacgattcagctcacccttgcactctttctattggttgcttccgcccttgcaaaggattgcaagctcccctctagccttgaaggttgtgacaagctctcgtgtcctgataaatgtctcggtaatcgctggacagtgggggacaatattgtcattggaatcagactatcgcatcccgatgttccctcgtccttcgaggaacctttgcattgctgtggatatcatattggatggattgtttgaaataggcaaactgtgttaagtgttattaactggttcattgtcgaatatctagtattcaaatcaaatcgtgaatcatgatgtatgggccccggccccttacactccggagtagaacgcgctaaattagcgcgactgtcccaacaaggactttatctctccatcagacctctacaacatacggagcaagaatttaccttgttcactctcgagtctcaatcaacaccatatacctacatagtagccctggaactaaaccccaatcttggaaaccacaagaaccaaccgacgcatccgacttccgcatccgacccacggatacgccagaaacccatcaccaaccccataaccatccaccatccacattatcacaatgttcgcaacacaatccccccaaacccccttccgccaatcccactacaccccaacccgctcctccccactccgcaagcacagcaccacccctccaccgtggaccatgtccccgacgcgcaacacccaaggcgcgtcgcaaaacaccgcaccaaacccattcagcaacccgccaccgaccttcaacatccaaaccgagccaatcgcccgacacacgcaaaaccaccaatccccaatcccagtgcacttcaacgcgtccgcctcagcctcaacaacaccaacctcagcaaacccattcctcatccacacccaaacacccacctcgccgtcctccccaacccgccagaaaccaaagttcgaagcacgctacgcttctacgattgcgaacccgcttcagggtgcggcgggtctggcgcgcgcgaaaacacggaagatgttccttaatcgcgtgcgccatgaacgtgacgatggacgctttgaggcgcgcggggagcagatgatgcgtatggagcatcttgctgatcggaggaggtgggaggagagtatggcgagggatggggatgctgttgttgggtttgaggaggaggtggatgaggatgatatgcttcccggtatgttttttcccctggtttcattaggtttgatttgtggatatatgtatgcattgaagatagggtggacatgatgaacggcatctgctaacgttctggttttggtagatgatgctgatgcccttgatgagtttatatctcaggaggaggctatggagatggctctttgggagacgcagaggggtgttcctgggagggttgaggagttacagtctaatgggaccggtgttccatttagtgatgatgagtatgatgatatctttatggcattgtcggagcctcaagggggtcagtctcagtctcaggatatggatatgtcgtgagcgggctagagctaagggttaagtgttgattttcttttgcgaggcattgcattgggtggcgttttcggtccatttgggcgagatccgggtatgtacataaactaaacaagggtatatcgacgtgggttgcgcatgagacggacgatgtatgagtgatgggaaaaaagcaaaccttggcatcaaggcgatatcttcctttcaagcttcgatcatacattttcaagatcatatcactgctgtgggcaatcaggcactccgccagctccacccatcgcacctcccaagtcctccatgaggggattcgaaactagttcatcaggcgggcttcccgccgcttgcatctggagacatagtcagtaaatgaaagaaccaagatatctcgattcaaatatagtaaactcacctcttgcattttctcccacacatactctcgacacttgggatcatcatccgagaaccccttctcctcaaacttccccacaatctgcttgacaacccgcgcctgcgtctcaaaccgctccatatcctcagccgaaaccttgccactgtttttattcttctcaatccacggcccgaacttgacgtccaattccttcatcggctcatacagcatctccttgttggacagctgctccatcatacccaggaacattttcgacaggtctccgtcttcgccagcacccgatgcccccgcctcaaccgccttaagcagctgtgctagcatatcatctgaaatatcgtcttcattgcttaccgcggcggtagctttatcaccactttccttcatgcggcccattgtgcgcttgatagcgtcgttgaacgagtcggcggcttgctctgcgcctacgcctgtgtctgcagttgccgtaccagaggagctctgagtgccaggagcagcgatgccagccgcggctgcagctgccgcaaaagtctctgccgaggctccagctccagaaccgccctcctcggccatcacgtcggcgaggagctgcttgaggaaatcacctggcgggatcccgctctcttcgagctgtttagcaaatacatcagcgccttggtcgacagttgcttggaagttgggatctaagctgctcccggcggccgcgcctggtcccatcatgctcgccatctcttgttcgagttgcttgaggaaggcatcttcgtcgaagtctgtgggtgaggaatccgagttggtgatggcagagggtgcgggtgggtttgcaggaggggcgggtttgggtttgttgaagtcatcgaggacgtctgtaggtatgagtatctgttcaccctggagcggtgcgggggagcgggggcggggtgaagaagagaggcgggtatgtgttaccatctagctcatcgaattccgagtcttcgtcgtcatctgcagccgctttctgcgattgtgctagtactggtgcgggttcagatgcaggtgcaggtgctggtgcgacgttggtttgtggcgcgggctgagattcctgtgtggttgcggtgggagcctcttcggggcggtcctcggtgggcaaggaggtagccatattgcgcaagaagaataacctaagcaagtatgatctcaattgaaaatatggcccggtcggagttaagcttaactttgaggtaaaaagaaagtctggagatgaggttgacatgtgacgggtgtttggcggggtgccgatcgccgaggtttctatgtattttgccagtcctacataggcaatgttgtgtactactatagtatagtcaactatatgatttagaagtgaggatattgatttactttcaaagtcaaagtcaccgttctctatattgctataaggcagatctaatcgagatcgccaaactctgtccatgtacaaagtaccggcatatagaataagatctagttcactactgcatacctagttagcatctccaaattgtacgtaaacaaccttctccgcatcttcccatgagatcatccagaatatccagtccttggcataccaccccccgcataatttcaaccaggttgttccatgcgagaaaaatctgcaaggcattccaagtccggggaaggtgcgtcatcccacgatgatcgcccattggtccccgagggaaaccagtcgggcgcctgattcgcttccaggtgccccaatgggtcagggtcgtaagatcatgtggcttctggatagggcggaagacaccgaagctcccatagcggttataaatgggatgatctggtatgccggtatcggctatacgggtttgcgcatgacatgcattcaaggttctggggcaatgttctcaatcattctcaatgtgttgcaacttgcaggcagtttgcaagtacaagctgcaaatgcaatatacaatattgaatatactcgtctttttaattactccgtacagcataccgtggaactgaaacacccccccaccacacaaccttggtggatcatacatccgagaataaggccattcaactaaacgtggaaccacccaaaaaaagccttttcttcccaatccagttagaaggtggaaaaaaagaagaaaaaggaaggcgagaagaaaagaaaaagaaaaaaacgaaaaagtcaaagagtccaacctgggcaggtacgcgagagcccctcctgaccggacagaatttttctttcttttagtcaattgttttacacaggtattttttgtttcctcttttatctcaattcctctgactctttctttctcataattcggttttctttatgtcacaacttgaactccctctatctcgcacgtcccttctgagttagccgcgcgtgtgtgtctctctctttccccttttatcctttttatcctttttctttttttcttttttctttttcttttttctctcttttttgccggccagcaggtccggcaacgcggggaaaactggctgtgtctgttccgtgtgcggagggccgcctacaggcttgaattagattatataatggtctcgatggttgaccatagtgatatggtcatggactcaatcgcgcctaaacatgaacccggtcctgatggctccatcagttccgccgtctcaacaccagatccggaagccgaacccttgacccaggatgccgcgcagactcagaagaggaagggaggcaggaaacccgtacgtaacatcttcaacctggggggccccgcattcctcctttgtgtcacagtcttatctcctttgcattgtatactaaccccccttcagatatatgccacctccgaagagcgaaagcagcgcaacagacaggcccaggcggccttccgagaacgtcggacggagtatatccgtcagctagagaccaccatcaagcgcaatgaggaatctctgcagagtctgcagcagagccatcgcagcgccgccgatgaatgtctaatgctgcggtataagaactccctgctggagcgcatcctccttgagaaaggtaccccttaccctgaacctccggtccaaacttcaactaactcccaacccctttatccaggcatcgatgtacaagccgaactacgtctgaaaacaggggcgccgggcgcccctctcaaggcaaaccctatgcccccaaaggcacctaatgtggcagggggccgcccgaaccagcgacaccctgcaggtatcgcctcgaagcccgaggcgttcggcatgtcacagcgggaaggcgcatacgggatcccgtcaccgcagttccaagcaacaccgacctcccacgtttcatcgccctcgcacgccaagtcccccggtttcggcttccagggcgccatgtcacctgtcgaggccggacggccccagcttctcccccaaccccggtctttcggtcagagttcgccgccggcaatcagtatgccgcacaacgaaccgtcagaccccaaggctcaatcccgtgggggagctatggggccccgcggtgcgcgggtcgcagcggctgcttactatccttctccattccagaaacactacgatcagctcggtaagcctctctttgactttgttacttagttcttccccggctgacctttcaagcagagcaagagtacgatgcccaggccgatatggtcgacgatgaccacgatggctcagcatcttatgtccctgggtacaccccgcagtccgtcgcctcgggctcccacatgtccggtttcaaccaaccaccaggcgagggcacacccagcgatttcggcaatgcaaaccagctcctcggccagtacgagccgatgatggacacagatccgtttgggttaagcgctagcatgcacttccccacaccgttcaattacgagcacaacaactcgagacaataaactaaatttgtctacatccttctctcttattctcttgttctatattcatatatccgtccatcttatgtggcaaatgaccatctcttccctaaaagtttgatttgagcattctccggcgttgtgagggttttgataccaatgttctcccctggtcttctcagaggtatattatgttacattttgtacatgaatcgaatctttccatcacggcagtcagcaaatgtaacttacattgcatatttccaatctactaaaccttcaacgctctaggatcaatgatactcgtatccctagtaagccccgcaacggtctttaaaatctctttacgtcgcaaactcgcctgcgttgcagtgaagctctatattcatcttccaggatatagaagatattatagttactactgatttatgatgtgccctgtgtctgctggaggactctttgcccgaggccaattggcttagcaccattctcatttttgtatcagatactacatacgctgcaaaaaatacgatgtgaaagtccctgagttaacccataaggcactttggatattctaatcatgctacttgtaggcgagctagagggaatatctagcttgctactatggagttaagtaaacagttatgtccgagttgtacatggttctttactcgatggctcaatctatcaaacgtcatgacatcgctttctgtatagctttcatcatattccattgcattcttcaagcaagttgtatacatttgtactagggaatccctaattcccctggctttcaccttctacattttaagtttcgtcaacctcattcccgatcctttacactctctcgtatatcatgacattcatttgtactatgcacgtcttcgtacctaaggacaccgacttcactggcagagcagttgtcaacgagcccatagccgccgttcacacggtcacaggccttgcctgctccgacgaagctgccgctgccttggcagcgaaagaccttagagtactccgaggttctttccgagacctcgagatcatcaagcaaggagccagtgaggcagatggtttaatcaaccttgcattcaatcacgacttcagcaagtatgcgtagagctgccttgatgagaaagagaccatcgaaactataagctcggtcctgataggaaccaacaatcctctcatcaccacctccagcaccttggggctcaagctattgctgaagctattagtcaaagtacaaggtctccctgctatatcaaaacctcttgacgaagcgggaagtcttaacagcttcatgtcttttgttatgaacattgataactcgacttcatgcagaaagacctaggaactccttagctgggccccttgccggaagcttttggatgatatcaaggccggggttatgcacagaattgaggagttgtctttcgcaacttttggggttgggcatatatcaggaccgaaatgcatacccaaggggagaaacaaggaccaatgcgattgccagccaaatgatgcagcaatccccacccccacatgtcaacttaaatccaaacttatccatcctacctgtgctatggatagctcggtgattacatagcttcgcaaggctgggagtacgcaggtgttgtccacaagtcagatcgacatactccaccgggacatgtccgctctgtggaagctaatcaatgcattaccatttgatatacacacatagtatcatatacagaaagggtgaatatagtacgtccaacaacgaataaacccaggtatactccccagagcagcccttgatgtaacgattacgtaaggtaccctaagccctagactgcgggcagccaatcagcaaccgcgggcatattcgcttaggaacagaagccgcctttcctgattagtcaccttacaccctgcaaccacaaaccgaggacctctcttcaccctgctcattcatcatcatcaatcttgacaggccggattcccttgggttctgccttgtgccccgttaactcctctagaccgattgtctaaagttgagcgcctccctccggaaggtctccgaaacacaacaggcgtcatggcggacgtccggtccaaggtacgctgaattggagctttcctgcgcgctgctagtgatgcaatgctatatgaatcgcgatctggaagcgatttgcggggttcaacggatttttttttatgttcattaactaattcgaattgtttcttctaatatagaacctctacgagcttctgggtaaatttcccctcccttgaatacaattctcggctatcttttccgacgacaatgagcttttttcctattccgaacaatccagctctattcgcatccgttcttcggccgactgatcgctaactttgcctatcaccaggtaacgacccagagctcgaccccagcagacccgctcctccccccaccaaggctatcgaccgccccgttgaccgatccggaaagcgtgatgcccccaaggagcaacctgctcgtcacaatgaggccaacgctcgccgtggtggccgtgtgaccgctggcaacgaggccggtatgtggttataagaatcgggttgacggaataattggactaataaatggacagcttaccgtgaccgcaacgctggccgtaaccacaaccgtgagaagcccactgacgaggctgctgctcagcccgcccgccgtggtggccgtagcggccgcggtgaccgccagtcccgcactggccagacgtaagcgatccctcgaatgaacgaatcaacccgaaaggaaaatcatgagaaccatgagatttcgtgaggaattatacaagagtgaccaaactaacccgaattatacagcgacacccgcaagcaggtccagcagggctggggtgccgatagcggcgagaagaccttggacgatgagcgccaaggcgagaagatcgctaagaaggaggagaacgagccccagacccccgttgaggccgaggagcaggaggagcccgacaactccaagtctttcgccgactaccttgccgagaaggcccagcgcgagaccctcgccgccaagcccgagcgcaccgccaacgagggcaccaagctcgacaagaagtgggctaacgccaaggagctcgccaaggaggaggaaccctcctacatccagccctcccaggagaaggccaagcgcgagaagcagcgcaaggagaagaacttccttgacgttgacctccgctacgtcgagcctccccgcagcggccccgctccccgcggccgtggcgaccgtgccccccgtggtgaccgccctgcccgtggtggtgagcgcagcgagcgtggccgtggtggcccccgtggcggcgaccgtgccccccgcggtgaccgccctgcccgtggcggtgctgctccccgtggcaacgcccgtggccctgccggccctaccgtcgacgagaagaacttccccagcctcggcggcaactaaattgcctgaccttgtcgggaactcgtgctcccaggcacggatattctttatcttcccgactctttcatcccttttctccatctgctaggtgtgcaagttcacccggaggtggtatttattgtgtcgcttcatctgtgatggtttctattttctctttcatggggattgggcttgaggggagtttgtgggatgtgagggattatccgtgctctgtggatgcaaaaactgcccagatttaagttttttcttttctcttgggaaaagacatattccgggttggtcttatatgtgttgtgtgtgtgtgtttacatttgccttcggtgagcaaacgcgaattggatgactgaattcgacgggcccatgtaatttgaatcgatccagaagaagtcaaccaaaaaaataggaacgcaaaatcttcaattgaattacgggacatgtctgcttcttatactttcaaagaattactatctcatagatctaccggtggggttgtacatccaacaggcaggtatacgcttttcgatgtatcgacgggcttgcataggaatagaccaaaatcggggttttatataaccttggatttacccaaggcgcagaagacttaaccctatctaggtatgtactaatgataagatagccaaagttgcaaaattcgggcccagaaacgagagacaaccgatttactgtgtcaacagcctctccatccacgacccctcgctgtgacgaaatgcaaacgtctacagctctccctcgccatggcggttctgccccgacatgtcgaattctttcgcggcagactcggcactctgggcccaaaccgccaaggtctcctcgtcgacttcgtcgaggaaagacaggccaggcatggcctttccaccacaggcacgttccaacgctaggaaagcaaaatggccaccaatgacaggccgagcaaagaagttcggaccagggaagcccccgtcaccctccgtgttgtgcaagtccgtcaatggacgatccgtggtggtctcattgacccagcgggcgacagaatcgaggatctctgtacgcacagccttagaggcgacagccattgagaagaattcccagtctgtcttggtgtacatgtggcggctgtcgaggggcaggccgtacttctgacgcacgtagtggtaccacacagactgcttctggtagatatgacgaggaacaaacccaggcgaatcggtatcggtaccctctagatggaagcagagctgggcatcggcgtagaggttgtagatcgtcgtccaagagccataccagtcgtaggcaagcttggcatgggaaccatctcgggacatgccaaacttttcccatttagtgatgtagtcacgggcgactttctgcgggtgtagttagtcaatctgtcaatgcacagataaaagacggctcgtaccttgaaatgggcagcgtcagcatcgtgaccagctacctcggcgatcttgctcatggcgttgatgcccacaattcccttgagagccaaattggtctgcagagccagccaacctgcaaagtcatcggttgagactgttctcaaaattagcttgcatgaacatactatcagaaaagacagagaaattgttcttacgctggttagcaggctcaagagagaactctaccagatatccggtccactgtttccaaaggctatagcttcgcttcacccatttctcagcttggtgctggcccttactaccgccaccccatttgctatcttggtgagcaatcccagacagtacctgtagattgccaagagggaagagtccagaagtctcgccttcagagcttgacgagggcaatccctgtgttgaccaaatggacgaggccgcggtagggtcttcatagcggagcgagttcacaatagccaaacccataatgaggatgttaccacactcttcaaccggcatgtactcgtccttcccgtcaggatgtccggtagcattggggaagtgtgtacccaaatcgtgcatcgcatacttattggggtattggccgctcagcatgtgctcgataagcggctccaaaaggtacgccagccatcgggggttcgtgtacaggaaaaaggggaacgcggggaagatgacatcgatggtttggaagttgccatttgaagagatctcctttaggaacaggatcgggtcgtccggagttcctgaaaatgtagttgcgcccatgacctgccgcgcactaagggcaacgatgtcaacatagtcatcagctcccgacaagtacgcgtcatctgccacttgctgcgagtaattggatgctagagaactagctgcagcgtagtccctgtagtggaaatccaggagctcctccgttgttgggtaccaagattcccacaagggtcgcatcatagtgagcccgcgagatgatgcatactgaacaacggggatttggataaaagcgagagtaaatgtgacgctgtcgttgtaggttttagatgaatggcctaggtggaaagacttggagaacgcaaaaaccggcgctcggtcctgaatagcacggaatttatcatcgttggtgtttcgcagagttccagagctagcaaagacacggcgcacgtcaatcgcatctccagattggaatttagcactctgtattgtgattagctatagatcagttcattttgacaagatcggacttacagatggtccagtgaaatgaagagtgccccattccgcacggtcgcgaatctctgtgagaagaagctcgttctccctctgtacttgccatcgattaagtgtaaggtcctcgtactcgattttcaagctatcccattcccatttgatcttgctaccagtatctccgctaacccagcggccgtcaacatccatatagatgctgacgtcgacatcaccttgcacatcgattgtgacataggaagccgggattgactgacgtaaagtcgaagttggagtaataggtgaaaggaatgagatagtaacgtctagagggtttccggtaccagtgtcaatgtggtaggttaggttggtcgttgaggcatcgtagttcaggccgaggtaattgggaaacttggtcttgtagctgtaatttgttagttcctaaacctttcatatatgagtaattttcgaattcataccctgatttattatccaaagactcatggggcttgcccagaagagggtagacggtattctggcttggaacgtgggccatcaacgaaagtcccacctcctccccagtatagaacataggccattttaaccaaggtgcatcccgagcatttgcgagccaagtactcagatatggatttcgtacgatcagggggatcacaggcggagtgagcgtagatgcggtgctaaccgatgcctggaagacagcggccaggaccacgagcgacagctgcatggtcacactctgggcgaaggtgacacagaattcggtccacgatacaatttatataacaataatagttggggttgtgtaacgaatgtactgaaaaagttgtagtaatgttggagaagaagaaaggttcaagggaggaagccgaatgcgggggaaggatcaaggatcaacataagtcattcctcggcttttgggaatagtgagatgggcttgaattgctctggtaattacggcttttcttttgtttaatcctatatcttctatacaatgcaattcaagtcagccctgaagagttctccttttcatcccccgatgatgtcatgcggagacagtactatctaatcacagagagaaacatgcatactatgcctattccggataatatatgtacagtatagtataggttcattgaattgtaaaacatgggcagagatcagtcaagagtagtagtggtaggtttgaaaaaaaaaacgatgttatccgcgatctatactggaatgaaggactgaaaccaccaacatccaccctcatgagtactgtgtcctattctgtctgcatattcattaaggacatgggaaatggtttgattgggaaagcaagttcaggtcattgccatatctcaggtgttgttaatattgtctgtcttgcatggttatatagttgctataaatagttattcctattagaaacgacattgggtcagttgtaggtgtcttatgttatgtatagccgacaggctatggagaggtttctattaggcagaatggaattcctaagagtctaatactatgtaaacttatcgaacaagcaagaagcaccatagggcagcatcgggtactccgtatatcgttgagacgtgacaatatgtagactaataaaccaagattacctacgacatccctgtaacttacgggtggtagcatatagaaaaggaacaaaatgaggctagtcatgcacctagatgcatggattctataatattgttggtcacaaaggcattgttcctcatgatatacctctgccatgggctattctctttcttcaagatgattatactactacatagatattgtccatcctgatccccgcaatcttgttcttaagcgaaagtatttcaaataatatcaccttttctgtttttctcttataatttaatcttagaccgcgtccgtggggtctctaacccttgtggatccaggacacgaaaagcactagacgcgcccaggctaggattgagaaattgatgtgtgacagtattataacccttaagaaagagtcctagaaaagtgaagtggaacaattgagacctgaaagacgtggaatcttcaatatcaaaaggttttataggggagcatcgagaaggaaggtcaattttatacgcgtttataggacaccagtctaaaacattctaaaccaagccattccacagtattaacagtatcaaaacacaattgcaatgtccaaatcgaaatgcaaacgcgttctcagacacgcctgtgtggagccccagtccgtgctctatacaaggctagtaagttatcgacctaaacgcgatcgacgcgaggaccgtttttcttttcccagttcgactttctacctacttcctactttctacttgctttctatatcttagcttcccacttaccaattgtgataaccctggaagttgcagttctctttacatatcgtattggttcgcgtcagacttccccgcagcacttccggattctaccatctcaaccttctattcccctcaatactccctcggactcacctgtgcactattcgaaagctatataatgaattcaacttcggtgcaattcagtcctctcaaggacggacgacaaattctcggcgagagagactcaaacgcgtgtctgccccccgccacacacgccaaaccgtcattcccgaccattgggaccccggtcaggcggatgccaattgctacctcacctaagaagctcctcccctctcctatatttgcaggccaaaaacggacacgggatcaagtggatgacaggggagaacttctcggacacgtgcaggcgcgggaatcctctccgcagctcggcgtccaatccaccgtaaaagatgatatgcaaagccaggtaagcccatgcgagacagacaaagaagtcccgggaatgaccagtccaaagctaacactgtaacgcgcgaatgatagctcatccaaaccccgacaccacaaaactcacaatctgaatgcggccaaacacaagatctaatggacatcgatcgatctttcaatgtgcctagcacccccgagcaagacatgcatagcgttaccttagactccgacgcgcgcaaaaagttcatccaacaagtatgcgagccatgatctcagtatcaaacaccttccccagcgggcagtttctaacaattgaacagaaagcaagccttctccgatcaagactacagagcgcgatgcgcaatgtgacagaccaccaatttgaccgccgggtctctgagctagaagcacacagtcgtaaatgcccacggctctcactctccgtcctcgccacgccacccctctcatcgcgcaaacaattcacatctttctcatcctcgcaaataaagacaccccgcatcggctgcgctggcttcatctccaccccctcccacagcacacccgatcttccaggccgaccttcgccattgtcttccagcgttgttcagcaacgcgcaaagtcacatgcccaacgaacaccgcctcgtgcgctcggctccccagtgcagctgagtagtcctccagctacggtcattcgccgtgaagccgatagggaaacaagcatgggcccaagagccgagcttatggatgatgtggatgctatgtcgccgtcacagcgaggcgacgcggtcgatgggctattgaaactcatgagtacgacaggcaatcaaagctcggatgcctggactggatgattcgaccgcgttttctttttttttgtgttttgtctatgctgtctgggctattgcttaccgtgtggagcatgcccgagtggattcagtcgcattacagtggataggagccattgccagagcaatgaattgcatgatgtatagggccatgacaaacatatcgaggtttgttgatatacaagtattggtccgaacatgacggggtaatcccattttggaagcatgcagcattattagaataattcgtctatatgttgcgatcaatgataccatttttgcatttgaacagtgattagttctcgtcctaattctagtatacagatttgaaaccaatagcagtgccacttcctaggcagtacataagactcatattatcaagtcattgaatgttacactacaagtcccaatccagaaaaagatcgctaaatatatcaattgattcaaggccgacagcatctatctaataacacgcccctcagcgaaccttcttcaacttattacgcttccgtccaaggatatcgcgaccctcatcaatctcacccgcagcctcacgcttcgcagcgccaacatccttgagcagactggttctaacaacacgactctcaatattgacaccttcctgcgcgaactcctccatctgcctaccaactcgctcctcaatggcaagaacgagctcgacatcacgctgcccaacaagcgtggtagcctcaccattccgtcccgcacgcgcagtacgaccaacacggtgtacatagtcatccggattccggggcacatcgaaattgataaccagctctacggacgggatatcaagaccacgcgatgcaacgtccgtagcaaccaagacacgggcagcggtggctcggaaacgagccaggttagctgtgcgctcggattgcgggaggatactgtgaagggatgtgatgcggtggccgaggcggcgaagagtgcgttccagcagatcgcatgtcttggtatggttgcagaagacgatgactggcttagtgacgtttatttcggtggaaagcagcgcgtgcaggaaggcctcgcggtgtgtcatgggaaccttcaggtatgtctgcttcagggttggcggaatcttgccttgattttcggtgccgatctcggtcatgaagatcggtggcttattgcctgcggccggcatagatttcagtgcccgcacttcggcggtcatggtcgccgtgaatagcagtgtttgacgttcggccgatggtggaagggctccgagacatgtttccacgtctggtagcatgcttcccggcccactggctagcaggcgatcggcttcatcgagaactaccattttgacgcggcggagaccggccactgtgtcgtctccggacgtcttgatgtgatcggctagtcggccgggtgttgcgatgaccacgtgcggccggttcgcaagttcaatagcctgtttccgcatatccatgcctccaacgacgaggacaggcttcatattttgcggcgcggaaacggccctgaactgttcatagatctggagtgcaagctcactagacggagaaaatagagtcagttaccgaggatgaaataaagacgaaagatagaacctctcatatccactaggacattgaaacataccgagttggggtcaaaactaaagcgtagatcccgaaaggattccgcgcccattgctgcataatcggaactgcaaaggccatggtctttccggaaccagtgcgacttccaccaatacagtctttccctttcaagatctcaggaatgcaagccttctgaatagcagttggccttttgatcgccattgtcgccaacgaagagacaagccaaggtgcgacatctaattccgaaaaagtggacagcccgctctgtttaccaagctcaattgcatcgctaataagaactggatcatcttccttcgattcaggctcctcctctacctcgcccttcttcttgatacgagagagggtggggagcggcgcaggcgcgacgtatgagtcgttggaagactctgagagacggcggcgcttgggggctcggtcgtcgacatcgggttgttcaacatcagagttatcagacacatcggagtcctcgaactcggggttctctgtgatcgggggcgccatcttctttgcgactgtctatcaggacgaaataattttgtggcagaaaaagttatctctaataagcggtgggaggttgcgggcctggtttataaggcactgtatatgcatcaaatgaccttggagaaaatcccatcgtatttagttaaataagtagggtttcaattaatacttaatagacatcaattggttttgagtctgtggaacaaccgatctatttgtttagtcgctgccggagaaactagacatcaatcaatattccaaattgttcatcgaatggtgtataatagtggtgagaacgaaaacataaccaaacataattcgagaaactttttattgccacataggctatagtagcaccatttagtccgcccgactagctgtgcttctgcgcgaaacccgggaggcgagctcatacgcctcacctcgctctagctcatcctcttcgactgcagacgccggagaagctgaagttcggtttcgtaggactccgtcatctccactcgaatattcctcctgggcaccactagctattgcttcatcgtagtcctccagtccgtgggtgccaccgacactttccatggtgaatggactagctgtcggcccatcgagtgctgcaagctcctggcgggagaaccatttaggaagcaggaatgagcgcgccgggattaggaggagaataataacagggaacccgatggcagcgatggtctgagtgatagcgaaagtcgcaccaaagccaaacaattcaagagcgacgaaggcccagatggcgaaacggcgctcgattcgcttcagaggattcgacgcagaggtaaacttcttgtcctcagcgaggaaaatcagtttttgcgtaatgccattgccttgtagagcctggacacccataacaaagaacagaccagccatgacaccctgtggaatcaagtggagcacgatgaggaggggtccagtcattgttccgagggtcaaaaggccctgtgcgaagttgctaacacgctgctctactacgtggtctgtaatccggatagctttccccttatttgtatcatcttcgtctgcgacctggcgagtgacgcagagggcggcagtgtggaagggggcctggggaatcagaccattggggaatggtactcccagaagtccagctacaaaggttgtgaggccgaggagccagaggtcccagtggaagccagctggctttcgaagaggaaattcggttccttgggcaatgagagatgacactggaagagacgtgtcagccatacaaatctactgtaacttgatcgatgtagaatactcaccattatgatcaaaataaaagagaattgtaagaagaagcgcaaatgggatggcaaggaaaatatccccaacactgatatcccagaaccgcacaagccaagaccggtcacttgtaggaaagaaagctttgctagtagggagcgtagcgacatcaacatctctcattttaccgatgtagacgaaaccggtaaaaaagatgatggtcaaaggtgtaccatagtcctcaagaaatttccgaatgaatcgcttgaaaagatggccgttgcccagctctccacagatccatgcacacattaggacaagtagtgcaaccatgatactcagataagcagaggtctctccaacagagccccattgtctagtgagaacttgaatgcccttctgaatatagatgcaagcaacgtagaatccaaagatgtcgcacgagaaccgagtgacataggtcagggcgttgcaggcattagtgatggccagtatccaatgcataatcaaagaccagctattatggatgtcagcaaagtcaatgatcgaagatgacaaaggaaactcacattccaatccaacacataaatgcaagatacggtgtccctcgaggagccatgatatcatagacagtatagttgaacacagtgatgggacctacaatcctcagttcaactttccatgtccatatattccaggtttcttaccagtgactccgacaatgaccaacggttgggccgcaaaaagcgaaaatacaaatgcaccaagaacggaagcaagtaggacttcattaacgccatagctttgacttgtcttctcgaacatatccaacgagaaggccaaagcaggcaagatactacactgattgttagcaaatgaaacagtgcgccggagaagaagaggttgatttaaccaatcagagcaagcatacttagcaaaatacatatagaccgtagcaggcacgacacgataatcccatgcatcagtccaatcgctccaataatatggtgctctgcgcttgacgtcgttgaccattccacggaacaaatggacgtgccaccatcgttcctgggctgagtgcaaccccgttgtcgacgcaccgcgatgcgagttttcttgcgggccgtcttgtcggtcaagagactggtcagactggtgtgcggtaccatgatcagctctgcctgagccctttgagcgcaccgatgatagctgttgcgactgccaagaagatttccgctgagcggacgtggagtgcatgttgggtcccgggagggacaaatccccgtgtgacgatccttgcatatgcaattgtgggataaatccgattattctttagtgtaatacaactggtatgaatttataaagtgccagtgacttgtattgtacggaaagacatatcatataggaggacatgaagcaggacataattgaagggagcttgattttgcggagaaatgttggggctgacctataagtggggcctgaggcatctacttcgagttaggatctgcctagctggtcaaaccgctactttcatttacgagtgtacaggacaaatacgataatccaacattgaattcaaggcgaactagaaagaattagtcggttactcaaaattgtatagaaaaggacaagtatggcgtttttggaacaatcgttagcgagccgtgggcttctgaaataaatcctcgttggattgtctttcaaagcctccatagccaatttcttcgcgcatgaacaaactatttgaaacgagatcttttttcttcgctgggaaggcgaggtcatcactgtgggggtgggggtgggggaggcaggtcgcttggaggtggtggaggcggagcatcgccaggcgggggcggaggaggaggactgccagcacctccggggtacattggagccataccaggagggggaggaggtgcgcccataccagggggggcagcaccaggagctcccatgccaggaggataagccgcatatccgtatccaccataaccaccaccataggcaggctgctgtccgccaggaggggccggttgctgccaaggagcagcacccggagcaacaccaggagcagcataaccaccttgagatccgtaagcgtagtcgcgggtttggggtggaccttggggttgggcctgcgcagcccaaggggcaggaccaccctggttgcgagatccatagtcgtcacgaggtccgtgattgtcgcgggatccatagttatcgcgggatccgtagtcgtcacgagggcgagggtctcggcgctgttgccatggagccacatcgctttggggcggcggtccacgctgctgccagggcttcacatcacggtcgtcgggacggccattgccaccgtcgggaccggcttcaatgcgacggggctcgtattcgccaggagcaccaccagacaattcattcatcagttgctaaggggttgttagtaccatgcccgagaaagcagtcatgagcaaagagaacttacctccatctcgcgatccacggcatcaccagtgccaacagcacgatcgccacgtgggccgccggcgttacgccagtcactgcctctctggcggtcgggacaatcacgagccatatggccagcattgccacagacacgacagatgatattcgcagtgaagttacgctgctcggggcagtcatacttacggtgtccaatttgaccacctgataagaaccacggttagaattaatcgcgcaacaaaggacgtttgaaaggtgttcacttacagttctggcaagcctggttctcgtcgtcacgaagggtaccgttaagagcagccagctcacgaagttggttgcgcttgagctcgttctggccttcagggatggatgcggcctagcaactgttaataccgggttttgatcaacaaaatgagatatgggaacttactgtttcaatgacattgtggacaagcttcttggccttgttaaccttttcttcggtgtccgccataatcagacagtgcaggtcttcttcctggttgctaccgtgagcggcgtcagaccgaccctttccttctttgacggagcctttgcctcgaatggcaatcttggcaccggactcggtctccatctttttcaaggtgtttccacgaggtcctatgagtaagccaactgtaaaaatagcaagagctaggtgttagtgatcctgtaatttttttaaatatgtgcagcatcaagcaccacggtttagcaagaaacaagctgaggacatccaaagtggtatgccttgtcagctcgagtcgagtagggactcgtgatagacgcaatggaagaatggttaggagttagagggttagttatcatactgaagttaatctctggatagtcattcacggggacgtagaccttctcctgggtcttggtggggcgtctgtagtcagaaggcgggttgtagttagggatggtcttgatggccttctcgaccagtttatgacgttcgtcctcaagacgcttgcgataacggtactcgcgagtgttcacacgtcttccgaagttgtcgtactggggaggtggcgagggagatctgcgatcaaagtcagtatacaaataaacggagtttacaaaggatgaaagcacgtacctgtcaccatcggcggggaccacgtcgttgattcgaagcttctggctgatttcctcaatacgaaggtgaagcgtataagcttcaagctgctcgctggtgaagttcgccatgatcatagttggcaggcccataagaccggcagccttattctcttgttggtcaccccagcggttgcgcttcttgcgcctcttgccatcgccatcggtgttcaagggagctggatcggctttgaagcaaggtcagtcttgattttgttttcacctttgagtttagaagaaacgtacctcgaacagggctacgcccacgctttggaccatcgggacccatagacgaagaggggatagaagaaggggtcacagtgcgactttcctcctctccatcctcgccgcccatgcgtcgccggccaagcgggatgttgttggagccagttattccctggttgcgccaagccatgactgctgctttggatagaaaaatgtgagtagtaagtgatataggtggaagagatgaaagaagctgcggtgttcaagaggcgagcatgaacacgtgatttcagcaaaatcttatttcgtaggcggtggcgaggccatactcggatttgggtatccccggacccgatattatgatgttctccgcttcgtcttcatagatgtacagtcacggtctgtacaatttccggatttttacttcattcttctcttatttcctttcaaaggctccattggtccaacttttagttaggcctattcaaagggtagaccttagcctgatttaactaggaggcagagttagtagagccggtaactattgggaaggttcggatggagattatgaaaaccaacgctttttgatccagagcaagatgatctttaaaagggaaatgaggtttggggggagaataaaagtagcatgctgggatgagagttcgatgaaatataggctgaggattccactcctcggcattagcccagtacctatgcaggtagatggctttagcctctccggttttcaatccaaatctcccaattgcttcttctttttccattgcttcaggtcaaatgttaccgtagctcatcctgttgtccattccacatgaaagaagccccttcaatggtattgtggatgctattgtcattcaaaagctcaaccaagcaaggtgttggctggtacataggccgcgagtcaatgaagtcgcgtctgcaacagcatctcatatgccatgccatggactgaatggagtggctttccatcaagaagggcagggcagggcctcaaagcttgatcacagaacctatcactctagcatgacgcatgacggagggtcgatttgatgatttcaagactgacccgttaatgtcccgtagaagaaaaaaacattctttttggaagggatatctggaccagtcatccttagcagaattgtcggatactgtctggttctgccttaacgtgtctgccgagccattgcattcaaggaatttgcggagcatccgggggtgtatcgctcattgtgtgtgtatgcagatgctgacctcaacaggccaggactcgggagagcgagtcaaggaacgcggataacaacactgtgtattccgctcgtggtgtagtgatatggagagggaaagagctacccgtaggtatctcctctcagtgccatccgactccaaggttccttcccaggttggaagtctagagagattacgtcagcagtagattttgaggaccctgcgatctggactctacacgacgatgaggcctttcggatctatgcttgtaggtttgcgattttttcgatactcagtgggcatgcacagtcttactcggttataaaaaaaaaactgcgaggggcgagcactgaaatggaaagggaaagccctgggatatggcctacaatctggggtatacgtgcccatgtaaagtgttccataacactcatacacaatcagaaaaaaaatttagtttatgatctcttgattggaatttcggtttgaaatcatctgcgcagctatccaagtcatcaatctcccagcagttcttctttaaactttgcctttagcctgggcctgcatcccctgttgaatccaagacctggcttcagcagccgttttatccacagctgccttattctgaattagatctttaatggtatgaggagaagggacatgacgaccactctcagtacctggatgcgaagccataagcttctcccaagccttaacattcgggaattcgtcaatatcgatatcagcccatcccgcagcagctatccatccccagtgtgagatatcggcaatagagacatggtcaccgacaagccaaccagactgacacgtagcaagatgtttgtccaaaacaccatacaatcggcgacattcgttgacataacggttcacgccgtactccatgcgctcaggcgcataccgtgtgaagtggttggcttggccttgcataggtcctaggcccgcattctggaagaacagccagttcttcatagcgtagtattcccgcgtgcccctggggaatgagatcttgttgtcgtgatcgtactgctctgccagatattctagaatgctaccagactcaaatagccggatctcctttccatcgctaaagaggtctgtcaaggcagggatgcggccattggggttgattttgagaaaccagctttacggtagttagctttgtttgtgtgggtatttgtaaagacatactcttccttttgaacgttcctcgatatgtcaatcttctcgaccctatattgcaggctacactcttagtaccaagcgtcagaaggtcgaggaaactactgtacccaagcatctctagcgctatggatattttgattccattgggggtctgggttgtgtagagggtaatagttggttctggcatattgacaaagcaagaaatggaactgaagattaaacagatgattgagaaagacgaattcttaatagatggtttaagtatgtatacgatgaggtcacattagctttccccgggctaaccccccggggcccacttgtcggatttataagctcgtggaactcacggactccgggaatgttctcccatgtgaagaatcatatcacctaagcagatgcccgggacttcttggggaatagttccgttctattacccctagtcgcatacattgcggcgagtgcatcaaaatacatgccctgcacggattgaagacgtgcgtatccctcgagtgtggattgtggcctatgggaatggcggaaaagaagcagatatggtggatggttgtgcaagattgaaacagacgaaagacctgtgtacctagtcatgtactgcttagtgtctagttaggtctgactgtactattgttatggctatgtagtgaacgagaggcagggctgttcatcaggcaggtcgctacaagttaaaggcttgtttgtggagaacgacgaagtcggcggttattccctggactgctgtttgaatcattgggcctcgatgcttaagttgagaagaatttctaatcaaaccgtgcattcgcaggaaagatatgtacaactctataagcccatgacgacaggaagatcgctgccagaagagaacaaaacgatcaaagtatacaagaaaagccagctgcaaagcaaagcgaacaggcaacaggattagactgtcgtataatcctgcataaaaagatgacagggaccatcacaacaaatacgctcatacgccaaaaaaagacagccacatatgtctaccagtacgtcagtctaccaagagaaactctcttccacataatcaacactagactgagcctgcctctttcgacaaacacggcgaacgtcatcactcagaccgccattgccgcagacaagaacgcccatggcaccaatttgattctcgacctccataccgaccagtgtgtcaatattcggacggccagggaacatctgcacggttgcagaggggctctggatctccttggtgttgcgcggccgtgtaataaagagcataatgcgcaggacttcacggcggcgatccattgccaagatactggtcatccagggccggatccactccaagtgttcgggggactggataatccagacgagggtgacgcggcgggcggcgacggtgccattcgcgaacccggcgaccagatgacggacgaaggggacgtggtgggtgatgccgactccgccggcgaagagcatcaccgtaccgtatgagtccatggtgtgaatgttgccatatggaccctcggcgaaggcgcggagggtaatctgtgaggtcggggagtttgaagcgcgctggaagagcttgtcggtcattccggtccggcggcggacgaggagagagatggtttctttttggggcgcattgaggatgtctttgcttgtgagtgggagagacttctcgtcggaatgactgtctgccgtttcactccagccaacggagaacgggtgtgaggtccacaagcccactgctgggatgtagaggtagatgtgctgacccggacggaaggtccaggggcgggctaggcgcagggtaatgcgcattgcgtcgccgtgcaaagcctcgatggttgcggtggtggattcacgaccgcagttgcggtacacaatgattaagaagcgggtggctcgctcgagtgcccagaggatgagggcagcaagtagataggcttgcgctggcagcccgttgagatggacccagaggaaacccatggaaactgccgtaatggcaatgtgcaaatggaggaatgtctcatagaatgcatggcgaataggcgagggcgaatgcagcaagagcgcagtgaacgcgcaagcagccaccaagccagtcagcaaaaagctgctaccacccagagccattccgacaaccttccagcctttcgcttgggctttgggaatagcccatgcaaacacatgtgcaagactctccagcaccacgatgcggccgagccatcggtggagcagattccatgtatcaaaaggcacatggagcatagcaattagagggttgctacggcctgccatcaagatcaatgggatcaagttcaccgttgccatcacgccggtacggttacgaatgacaccagcaagcgtgtctgtttcggttccataaggagttgtcacacagcaaagcgtgacgttcatggcgataacgccggtgataaggaacgcatggaagcggctaggcaaagtacccatgttaatagctgacgagagctggagttcaaggttgtgtcggtttcggaacaatgcagcatagattatatgctccttgatccaggcaaaggtattgtgtgttgagacgaagtaccgttgccggtcatcgttaaagcttgccaggcgtcgaaggtggcgagagaagcagaagacgagctgccagatgtaataagcggcggcagcacagccaagggcaaggattgtatagcgtgccagactatcgttgatggcttcgtagtagacagagtaacccgatcgtttttcgatgtattcaatatccgtcgcactggtcagcccagcgagggacatcgccagcagaaaggagtgcatgatgacagaagatgcacgtcaagtgcttgggactgaacttgatgtgtggtttagcgaggccggctcgctagaaaagagtgtatgaaaagggaaacgttgatatctggatcgaccccacagaaggctcggaagatattgtcgagaggtaacagtaaacgaaataaccttaggttgcttggtcgaaccacagaagcaagggtcaaaggggtttccgttgggtggctggtgtaaagtaaaggacctgcctatatcttatgtatagaaatcagacggaaagcatggaataaagccgtttttcgatatgttgtcagtccaatcgagctcggtgggaagcgaagatgttcacagaacagcgggcgatgtttgttaaaggcttgttgtcgaagggcaacgacaggaatgctagtgatccagtcactgctaaaaaatgggctaaagatgaagaattgtccacagtgaaagaatgaggattgtctcaataacaaagacaaaataaatgagacaatattgattgtagttagaaaaagagaagaaaacgaacaatgaaagatcgaaaatagaagaaaggactgtttccccttgtgtttagtcctagtgaagagagagtaagacagtgccagggccaaccggaccaatatgtagaattccagcaagactctccacctccagcacggcccatatcaatgtggaattcggtcatttccattttggtttccgggattgttctcaaatttctcgaaggaggggggcttgacgctgggaccacaggtgagtgtaagggatttctcatgtgcgtactccgtatggaagatgctgcagatccaatgcagcaaatcaggggcccgtatttgcagataacctcagcagagcttggcaaaacatggacatagaacacgcgacaggtcaagcccgagttgtcgtaagtggcgggaataccgatcaagagctgtgactggccagcactgttcaatagtgaaacagccaagtggatgaagcagatccgtgttgatgcttggcgtctcctttagcgcccacgtcaacccacattaggggctgtgaaacaactccggtcattatttgctccagtcgtcactgtaaaaggttatctcccgtctccagggggtgttttcttggcggatttcatttatatcagacctgaatctcctctcacggagaattatcctccgagacactgtgcttggcctgcatctgatgaatatattcttgccattttccaggttgtcctttactccgtggtttggcgaattggaacgggatgatatgaataattcaaggccttgtgctagagtttcgtttccaatttgttttatcttaggtgccatataaagtgcgcatgtgaattgtctcaggttcatgtccaatcgtggggtctttccgttggcatccgttggcattcgttggcaccgttggcatcattggcattgttgggatcgtgaagtccaaagactagtccaaagttgagaaaaactaaaatcgattacagaggccatgaacaaacatccaaacatccaaacagcaaaaatccctaatccaacgccatgggtatcaaatcaaaagtactaaacaccgatttcctaaaacaaaagcggaccatccatatccaccgttcccaaataaaaatgagccaaggtctcgtaaacgattgatcaaaatcagccatagacagccaaaagatctctttacaatgtaaagtgggatacacatcccagattcatggatgaaccaggggactctggggggtatccgacactgctcgcgaaggtaatctcaactaaaattagccaagaaagccccgggtcaggccccgatcaaaaaaagctgagctcgtcgtcactgtcactatcctgaaaatatggattgaccttttgtcgaggtttcggcggctcaacgatgccgcccatggttgaaaccgaagggcgcgtagaccttcgcctctctactgtacgatggacctgcttcgcagcacgctccaaagggggccgagcaataggctgacgcgggctgcattctttgtgattgacgatcacgacttcaaccttccgtgcctgttgtgttgccggggtcatccgtctagccagattggtgctgcgctctcgcaggatgtcccggcgagtgactagttccacggtaggattgtatctagtcgagaaagtagagcgtacttgaggggtattttcacccttgtcaactacaaccactggagtgagtcgttgccgttttctaggccgtgttggtgaaacttcggtgtcctctaaagtccgcttggccgccatcggcaggggagatgaggtcaaacttgagacagagtcctggaagcgatcagacccaggtgagccgctgtttgtgtctgtagaagaagcgatacaggggaccgggcttgatagcatgcgcatgggcctttgcaccaggatgggctttcccttggtcgctggcgtagatgccacccactcccctatgctatcttcccagcgaaacagacccgtactctggctagatttctcgggttcttctaaagacctttgggcagtctcttcctggcgctgttttttcacggctgcctcctgaacgtcgatggcccagatgtggtcatcgggatctcctgtagcctctgcaaactccatggcagcttccgccgccactcgcccaagcaaagtggacaaagctggtgtatcagctaagcgaacgagttgcgaaatcatgtctcgtatttcgccgccagtatgttcggtttcatcttctgctttctttctgaggcagcggaacgcttggtgtacaaacaatgctaattctctaatcatgtcagaatgagatgctataacctccgcgtattcgtcaatgctagctgttgacaccatcgtatagtggttgtttaataaaatttcgtcgttgcactgtacaagactggtagccagcaagatgcagccacgccgtaataattgatgaggggtattatcaggccgctgcacgacagaaattgagtctagttctcgctgcagagcaatatgaagatagcgtgtaatgcagctcgccttcgttccatccgcacaatcagtgtcttcggaggcacgagaccttgaaatgtgcatgccgcagatcgctgccatgaggcttataacgtgattgctcagtgcatccttcacttgtaagggacaaggccgtgcaatatttgagatttcccacgctatggggacagccctggtcgtacgagcacgagcagtcattcccttctttcccttcacgagtaattttggtgtaggactctgagcaggggtgacagagcggacaccactagctgagagaatcacagcttcaatcagacgcgtagctgcaggacagtcttcatcctcttttgagagggatatcgttgctcgtgtcatccagctagtccacaacttggttcccatccactctggaggtagcactccccgcaagagaagcttcgcaagttcatcgaagatgtaagagcgattggcaacgccatgatgagcatacttgtgtaacaatcggaccggatccgaaaggtcatggccaaccactggccttacagcctgggggtatgggtaatttttgcgtgtggaaagcaatgtagagagcaaagagtcactttcttcgggcgcaaaggaacgacatttctcaatcagcgcgcatgcaatcgaatctgttatccaatgattctgtatcagggtagaaatcaagtagataccctgggcgcgaacagcctcgcgaagtggcttccagcctgtcccataaggcgcataaaatgcttccaattctgtaaaatatgcattacacatatcttcgtccccgtcttcgtccaactcgtcctgcgcctcttgctcgctcgcaataaattctggcaaacttcgtgccaccatgaacagcaaggatcgtgccccacgcctgtttgtttcggataagggcttcacttctcgcgtcgatatcacagtattgcaaaggaaattttggaagacgcgatcaagattgtgtgctatgctggcgaagcccggatcaccagactggtcaagaagttcttgccaagggctcttgtggagcgaatatcgatcacggaacacttgcggctgtggtagttggctattggggttggcatggccttccgggcgttttgacggtgcactcgagggcatctcccacctcctcccagtgatgagtggtgtcgcgacctcaatagcgccgggcagagtgcgtggggcttctgggctgtgtattgatagtctatcgcgctttttgcctgcagtatcttctgctttggacgaatacttgtgtctgggtcgacgtcgctcgggctttttccctggaatccaagctgggtcgttttcatccggatccgcatccgagcctgagcagttgtgccgactttctggtttgtggtcgggttccgaagtaggcaaatcattgctctctgctgtttcttgtagttttgactcggtcgcgatcatcgacaccgtttctttgtgctttgcgattcgacggcagatggaggtcaaggggcgcaggacacggtttgcccattttgcggtggcttgggcatcctccatttaggacaaaaggaataataataactgctactagcatacaaaagaatcagcactgtcacagggttcttctggtcattggggctgcactgtaccaacctccctactaacaaacccctcaatgatacatgataggaacaatgatggcactcaaccaggtattgccaataatgcagcaataagccaatgtaaataagatatgccgaagaataattacagggtgcgttgagtgaaaaatgaaggacaacattggatgagcaaacaaataaaacaaacgttgactaatacaacaaggcgggtaaacacacacatattgcctattatggcgatcttagtctccagatgtatacaatcatgttcctggaggtaaatatacatgcatctattccatttcaaacacttcatatcgacgtaattgattctactcagaaagagaaaatgacccaagtggcaaatccgcataatgcaccagatatgagcccattttaagacaaccgagtcctttccatgcacggcccaggagaccacccaacctggcagatgaaaccaaaaacgagaaaaaaaaggagagaggagagagatctaaaatacaacagttctttttgctcatcaagcctgcccaccgatccccaaaatgacaatggatatagatattaacacatgtaatagccaagaaaataagaacggaaaccaattaatgctgtttaaattggctggaactggctggcgtaggaaatcgtttatgccttgttagactgcttggagccgcgaagcttagggttgctggtggctgcacgcttcttctgcttggagcgcgaagaggtggcgtcgctaccttcaatgaacttcagaagctcgtcgatgctgcgagagtcgagagccgaaggatcggtgggagtactgatttcgggcgcagactggccaacctggggctgaacacgggttcccatggaagacacacgagggttcagagggttgcggcgcagacgacgagcctggatgtccttggcgtgcttggcgatagagacagcgttctgagtgagctgctcgagccagttctcggcctccttggtgttgcgatcttcgggtccaagctgagtgaggaagatgttgtatgcctcgcgcatcttgccgacggcagccttggagtcctggtccaaagcgagtgcctgggcgagttggaagagaatagtggcggtattgatagagtccttgccaaagaggtcctcacagacggagagagaggcctcgaaccacttgcgggagtcgttgtactgcttgaggtgttgcagcatcacggcggcgttgttcattgtggtgatggagtcggggtggttaggaccgtagatgatcttccatacatccatagcatgcttgatgtaaaccagagcggtcttggtgttaccagaggcgtgctcgaatagactcaggttaaggtagctcagaatagtgtcagccgaatcgacacccatagtgcgttcagtgacaatgacggccttgcgggccaattccacagcagcctccttctcatcagtctggtagtacagcatggaaagctggtggtagagcttggcgacctcaggatgcaggataccgtaaatttgctcgtgcagagacaaagactcaaggatgagctcctggcccaactgcttctggttctgcatgagagagatacggccggcctccagggcctcctctgccaatgcgctgcgaggagaggcatcacggaccaaaggaacaacattcaggatgtcatcagcagtgaaagtgacagcgggcttagctggcgccggagcggcacgggtgggggacttgttgtctccacccttcttcttgcccttcttcttaggctcctcgtgtgtggatccgttagtgataggaacaacaacctgctccttgacctgatccttggtgaaggcgaaatcacgggcaccaagctggatacccaacttgatagagatatcacgcagaagctgcaagtatctcagggagttgctccagtccttctcaagggagaagcggaagcggatggtgacctgcttctcgatttcggcccggagggactcgggagtgacattctcaaaagagaaatcgccctcggggaagatcgcacgcagggattcgtcaatctccgccttgggagtagcgttgacatctgaaccgaggagacagttcagcaggtgagcaaggcaaggggcgacgaagggggcgggaacgttgttcaggtagcggttggcaacgtgcttgaaggcacgagtaaccatttcctgaaccacgaggatggacagggcctgcaggcgaggtcccttctcggcggattgcttggccaacgttccgaggtaacggaggttgataccacgcttgtgcaacagctgggtcagcgattgaccgtccatggggaagccgacgtcgccgtcgtgcaggtccttgagcaggtcggggatgaccttggatcgcaagtgatcacaggcatcccggacttcttgctcatcctttgcccattgcttcttctcctcctcagtctggggcacctggccgctgaaaacatcggggttgagagcaaggtggaaatcagagatgtcaacacgatcctgctccgcattctcctcctcaggcttgccctccttggcagcctcggcggcagcagccttacgactctccacctgggccttcacgtactggctcatcttgtggcgccagtaggactcgaccaactcaagtctgagaacggacatgcggtgggggtaaacatcgcttccatcttcttcctgccactcgacatccagaggagccacgcggtagagatccaggacgtacttcctgccgtcagtgcccaagagtcccttagtctcgacgctaccttccaactcgtggcgcttgttttccttgtcccagacagggtgctgcttgacacgcagcgccttcgagagcttctcgaagaccgggataaagtcagcgtgagtagccacaacctccttgccctcaacaccaccgtagtcaatctggtgctcaccgggctcgcgctgcttgaagataccaggaacaatgctctggccaacaatacgcttgcccaggtagtcgaccaccacggttccgggagtgaacagtccgtcgatatcaagctggttaacggccttgataccgagaacatccttgcccacagccacacgtgcggcttcgtcgccaccctcggaggtgaaagttccaacgccatcggcaccgaaagagtagaagatgttgttgtagacaaagatctgggcgtcccgcgcctcagtggggttcagaggagcaacctcaccccgggcaacaaggactgcaccacgagcggcggcctcgttataatcagcgaacagcttggaagtcaaacgttcccggaacacgcgatcctgaacggtctcgcggggcagctcgcgggtagtctggaactcctcgttccagtcacgcagagtctcggcattatcaacaccagagatcaggtagttctcctgcgaacgggtgatatcgggctggtgagcattcaagcttgaactgctgggggcgatgagccatgggctgttggggatggcgttctggaaggggaaagtggtcaaaagatccttctcattgttgtactcctgcagggcctcgaaggaggcgtcgaacgagggcgagagttgagagatgagagtgagcaaggagtgggcgctgcccttcttggggtgtgttggcttcggggatgggtcgaatctgacgctcgagcacttgttcacgaagaaaccagacacatgggcagtgatctggaattgttcaccttcgttagtagaaaccacgaggtaaagcaagtggcctttctggcggaggttgtacggaacagggttccatgcagacaacgagatagacttcactgtctttggcagaggagcctctgcgatgggcaggatagtttgcagcggtgaaggtccagtgaggtcatatttggagagcgagtgttccttgtccgactcgccggccttgatagcgtctgccgtgatagcatcgtgcaaggacaggccagcggagataccatggaggttatcaacacggtcaccagaagcaccaattagctccctgatccgcacaatatgcatgcgggcttccttttcggtgtagggatcttcgaccaggacgatctcggagtcggcctcgaggtctgggacctcagacagctcaacaaagtcgttgatgcggttgccgttgaactcgaggtggaagcaagtgtattggaaggttcccggtaactcgacaatggattggcggacatcctggacctgttcttggctggagacctagaggaataaacaggtcagataaattttcgctatttgtggcttttccaaacatcgaacccaccatcacttgaatcttatgaggcgcatgagggagcttcacggtgatctggaaaagacctatagtcgggttagaacgccgctacacagttttgcgcctgtctacaaaacataccaccggtgttgtcctcctctgtgccctcgggggcattgccattggtaatctcttgggaagcttgaggagcctctgttcctccgttagcttgtgtgccctgcatcttgttttacccggagcccatgctgtattctaatagaccttgtccagcacggaggttccaaggaacacacacctttcaagtgctccaactccccattggtctctgccattatgtcgagccggttatgaagagagcttcgacgaaagaataacagtaaacccttatctcacaaccgtcacgcgggcgagagacaaagttcgggaaaatggaacgaaaagaaaaaagttgaagaccagtggagcttccagggattcggcagatagaaatcttaggatagtatacaatataagggcaattgagcaagaaacaaaaaccccgtaccccaggaagttgaaaataaggcaaggatgaatgaataggacggtgaaattgggagaccggagagaaaatttctcggatgcggcataccctcggaagtgctcgggcggtgggtttcaaggaagagcgcggagaggacattcattctccacagtgtctatattttggctgtgactttttggcaagggtgtaattagtttgcgattatatatagattggaaatctatattcctgccaaggtaagcctatataattcccattgattggatgttgacttcaatcccatagatctacaagtatgacgctgtagtgcctcaggtatcaatatttttcgaatgtgcattagcgattgtgtacaccgtggcattttacttttcattttaattttattggtaataaatcatttcccaggcaaggtttgtctttaattagtctatcttaatatgcagaagataaaatgtgtatcgtgaagacggtttaattctaacggagctgacgctatatgtactatgtacttgactaaaaagagaggggcgaggtagggatatagatggagcaaaattaaatgtttgaattctaagacctagtgctcgaggaacttttcaacttttcaacttttcaactgggtgaatgagtggattatagactctgccaggttgggtatatatgtgacgtagaacaaaggctgagatctataactcggggtttcaactattctctagtagtagattagttacctagatacatatttacttagtcatcccttctagcagattgaataggaattggatgagcccatggattggatatcgcaattgttagttagaatccacgtacagcatagaggctatggtactttatagacaccttatttactctcctaaagccaactgggttttttcaaggatccactgtcttacacagaccttgaggaaaaccaattagagaaaccccatatattcattgtagtaatacatactctacttgcgcaacgtaaatagatggcgatctgattcgccaagccttccgcgtccctggttcatcgaggctgatgttaacaccacagctcagccacaacttaattcttttcttgaactcctttctttcttctagtctttcattaacctcttttgtttccttgttttcttgtttctcttctgatactcagtcttttcgatccgcaaaatctcccacagtctctctttcaccgacgcgtcatcccctagaggtgtggcttgcgcaaccatctacaagtctagaatcctagcagtacactccttcaacctttgtgatttatatcgatacaggtcctacacagccatctgcagttctggttatctttgacaaagatatacattctcactctcattgcctttcactggacttagcaacccgtacaaacaaaaaggccaatcacgatgctatggagccgactcgcacagcctgcgaggtgctatgcccgacagggcctgccaaggcctcccaggactaacagccgcgttgtactacacacatgcaagcggttcaactcaacccctggtcaaatgaatccaaatccctccgagcagaatgattcggatgagggcaagggcaagggccagggccgtaacggcgattctgaccccaacttcaaatctactattctgaaaatgcttgaaactgcggcaaccacggcagcatcaattgctattctagggtaaggtgtacctgcattattcaaggcatgcgttactgtggctaattttctcccaagcgcggctggttactcctatcaccagtactacaagtacctgatcttggaaaagatggacaatgcgttcgaaccaggtgatcctgccctcgaggtcgcgggtgttgtttctggaaagcaccagtacagccatgaggaacattgggtcattcgcaacgagcaacccagaattgatgatattgtagctggtaaacaaagtggccactactatctaattatcggtgaaaagggcacgggcaagacgtcgatgcttttggaggccatgcgcaagatcaacggcaacagctgtgcgttgttcgaagcgcatgctgatcttgaaatcttccgaatccgactgggcaaagctttggactacgaattccacgaggagtaagcttatactgttatcatcttaaacaaataacgctaatgggagtacccagctatattggcagccttttcagcatccgtggtccgagagacactacggctctcttggacattgagcgcgccttcaacaagcttgagaaagtggctctcaccagaaggcggaatgggtcgactcctcttatattgatcatcaacagtacccacctagtccgagatgaccacgacggacaggatttgcttgagatgattcagcagcgtgccgaacaatgggctgctagtggtcttgtcacaacaagtatgactccaacaaacgtcggttcctcttgccatagctaattttgttttcaagttcttaacagcgatgactattgggtatacgagcgcttgaagcgttatgcaacccgcatggaggtcattcctgtgtcagatctgcctaaggacaaggcgatgagtgctttgaagaaatatcgccagcaattccacaacgagacacttccatatgggatcctcgagcaagtctatgacaaagtcggcggtcgactatccttcttgaaccgtgtggccaaatctaaggatatgacacagacctgcgatgaaatctgtcaagcggagaaaacatggttcctaaataagtgctggatcctcggaatggagatggatgatgatgtgatggaccagcagaagtacgccgtaagtacacactttaagatcttctggttcttgttacttcgatgcaactcagaactaatttaaaccacaacatagtctgctgctatggttctggcgaaagcgctggtagagaaagagaaagagatggagtcaaactaccacgaagagcaaggccacatcctgccagaaattccgctccatgaagcgcgcgagatcatgacccgtgctgacttcattcaatcttacgatcacgaaaatatcttcaccattgattcaagagccatggtgcgtgctgattccgtacccatgcagcgtgccttccaagaaatctgcgccaaggagaacttcgacaaccacctggacagaaccttagagcggattggagatatcgagagtcttggccgtactcgcgaattgaccatcaaagatctctggaataatggcaagtatcgcatggttgtacgggacaatcgcggacgagagagtgggacagttgaatttgctgtggctgaacgtgaaggtgaaggtgaagatgaagactagttattttgtatatgtcatacctagattcacaaattggaggtcctattgtaattacaaatctatactatgtggcagccctggagacatcaagtcgccgagtcctcgaatctggcccttggaaaggcaagagtgacatcatcgtgtgctcaccgccaaccaaacatttggcccgccttctctttttctcttccaagctttaaccgcgtgaacacaattaccagtgatttctactcttgactctgcatttaatttaactcgcttttcacatctacaagcctcgaagcctcaaaatgccgactaagacccctaagaaacgaactgtatcgttaagtgaacacacgcgacccgcgcgtgagctcgcgatcgcggccactgcacagacctctcgattggcgtgcatcccatctccagcgcgcttcatccttgtcgttttaagcagtctcactttgagctccgttcttttcacactcacctctactttgacggttggcgatctcgggcctatcagcaaacaccttgaggaatggtgggaagtgggcggcttgatcgcctggagggctgtggaggtcggattagcttgggttctaggatttgatggtaagtatcaataccatacacatggccccttttgcgtccggactcgaggctcctacagctatatagacgatgcaaaaaactaacctcgtggttgcgattaggccgtgatgtggcatcgttcctattcctgacgcacctaccgacatactctctcttgtcattcttctacggcatccgtccaacttctgcactgatagcatatggagtcacgattgtctccacggcgcttcccttcgcactcctgtgccggccctcgtccgtccacaacctttcgcaaacacctgctggtgcagttgccaatcgaaacattctacaggataagactaccactatattcacgactctcctggcaacctcgattttcagcgttgtgctgtacgccagctatgcgacttggcttcctacacagctggtcattcacttcgagggcctcccggatatcagcgcggcgcatgctggtcccgctggcttgcctgttctcttcctgacactgattcctgctggctgggctgcgcgtgactttttatttgttagctctactggttattcaaccgctaacgatgggtctgcaaactgctgcgagggtgaatatttggttgcggccatttgtcgcaacacttggggcaaactgaccaccaagacgagagttttggtttctcggtccattgtactcgcgcttgcagtcttactcaacacgattgttcaagtggccggcacaatcagtgatgtctctatcgaaggtgctgccacttggggagcggtctggtcattcgcgatactgattgcaggagccaccttcggctggatcgaagccgttgatggcgtatgataatatgtgataatgacagcatgagggattgtgctcccaggttgattttcgtttcagctgcgacgggtgcgcgagaggtagaggcagtgacccttatcctatttcttatggcgcgcttggttttgatatgtccaatggttttcttgaattacgatatataccttttgttgatcagctgtggggttattggcctcattcattatcttcgttttgtaaaatccccgagtcttatcttttttttccaaatgtcaagtactgcttcttcatacttcttcacactcggaacgttcctctattaccctttcgttattgtttgaatctgatatcttgaaaatggcctggaattgaaattaatcataagtctatgtcattggaacgttaatcgctgtataacatccaacaccccaattaagtatctagtatttgctggggcaaatcgtacgtaagaagtgacaggtatagagaagcaagaccaatcccaaaacaggaaacaggcaaaccaagtaacaagcacaatgatcaagcaatcaccagtgagtcggcggccccccgtacctgtccggttgatcaaccgaagtgcgctcggttttatacgaatcagccttctcgttattcaacatccatccaggatgcagcacattaaacacagccaccgaaacaatcatcatagccccatcgagcccaataaagtacgactcgtgagaaatgagataaccatcccatccctccgacaactcgatcgtacgatagatactccgaacatagatacagatgatggaaagtaccatcgccccgaacaggggaaggatcgagccggaccccggctgcagcagattcttgcgcataacgcggcggatgaagtcgaccgcgcaaatgacgaatatggttaccgagaagagctggaagacaattccagcgaccatgatgtgcgtgccagttgcggtgtcgccgccgaccgtattggcttctccggaggccatgccgccgccgatggcttggacgacgagggagattacgtcgcaggtgcagaagatccataggtacaggcttggcttcaggaaggaggattcgcggccgaggatttgaatgaagcggcctaggacgacgtagattcctgctgtgaagaaagttggggctgtggaatgttagggtgggcatggatagtcaagggcaagaaggtagcttaccgatgatgagggtggagatctgcattaggaaggcagttccgttgtatggacatttggctgaccaggtacgaccggcccagccgattacttcgactgttgatgttgttagtattgcggggagttagggtttcaaatgtcataggccttacccaaacatcccacactaaacacacttgcccaccattgtcgcttccatatgaactggattgtatggataatcaacgagaggccaaatagggtgcagaaggcaatgcctgctcctagcgatgggatatatccatatgaggtgccaacgccttcgatataggcaggacagccgtattgcagctctagcacgtcgaccatggcgagaaagaaaacgaatgaccccgaggaatctatcaggggattggcgagaaaattaaagctaacagtaaatccgtagtacttggatggattgaaagatagacagagattccccagacgactagagaagagatttatagacaaccaccccgtttgtccaaaatcgaaaagataccaaaagagagccaaggatcaggcttcagtattatccacgcgcacaatttgaatataagtgagaaagagtacggagtaagagcatggccgagcatccactagccccaccatcgggaaagacctttcaaggccaaagccacgggtctctgaatgcactacggagtacaataatctaccggggaggataagacccgcatcggcgcaaccaatcccgacattcaagttgttcatgtccaatggccagtttccagcgtccaaagcggattgagaaacaggccgactccggttggtatagaaaggcacatccataagatacggtaaaaagcgagcaggcagccaaccgcctgggggtatccctagccgatgagtattgtactttatacacccgacggactactatgatgtggtagattaaggatggcgtcaaagtcaagcctcataaaaaatgggcgcgatctgatagataaccgggccgaactacaacttacctcgcaagcctacactctttgggattagcgtggatgtcgccaagtttgcctcataagggattctatttatctccgctaaaaccgcacacaaagaagagtcttatgaaaggtctaaatgcgtcacgacaatcggtaaccaagcgctaggcagttggagagaatccggcttctatatctccgacttccaacgtcactccatcctacaatagacatagcgaggctatgtctacggttgctcgtattcaagagtcagttccacacaccgcttcaagataataagagacaatcacaatcaaacagatcaagtctggctctggccctagttttgtcgggatatcggatgaacgacaatccaggtccgccgcctcggatggcgcggatgtacgtatgtgaaaaaaaattacgaaaaagagtacgaggatccacatgcaccttattcgtgactggttatttgaatatcacatcttctcatatcggcttatgcatccctggacaacataatagactggcaacgtccatgaatgttaacaaatagccaaaggaactcatacttcgtatacttataggcaagccagaaaaggtaacgatcgccgatcttcactctagcagatcgcaaaagcagtggagtatttaacctcacgaaaagcaggccattcacacttggtacagccaaataaaaaattctccgataccgattctccaaggtccagtcaaccaacagaacaaaggtatttcccaagtatgatgaccaaacggagattgagtctcgtctgcaacattgcggcggtattccggccggacaaatcgagtgagcccatgcaaccatgcatatgtactccgtatagcgagacacatgtcgcccgattggacaccccgcccatagtcagtggcggagccgggggccatgcgatcgcagagagtgggggcgatgtcatcctctgtatggatcgggagcaacggttttcgtggggagagatgcaggagattgacactggtgcctgcatcagtatatccccatcccccacatccattcgcttcccagaaatcctccaaactctggccgccaagcatggcaccctgacatggtaccaaaagtacgtcacagattctgggcagcttccaatctcgacccgcggacgccgtgttcgcttacgtcatttccggattcctggtctgcgctgggtgtgctagggctgcgatgattagcccggcgtatgagtggtaggctgattgaatatgatgaatcggctctcacgtgtcgctgagaatcgcgcaccttcatctttttgttgactgatcagaccaaggttgatatgaacagacgactcggtgaccttggccagggctctgtcttacctcgttcagctactcttgctaaaacatggctatagtaaacctattcgattgtggatgggcagaagagaaggagaaggtaaaaaaaaaaaatgacgagctttcattttggtaacttttcatgcctgattgctctagaataactgacattgctttaagaaccttggaactactcaagatcccagaatggctcagccggtttgtggaagttgtggaattgtggcgtgtcatagatacccggaggatctatgagtgaaagtcagtattgcatggaaaattgcaaagaggatagagtactcaccgtcgcggtttgccacaatatacctcctcgtgttgacgatactcccctccagctgagcattcagctcctgctgatacacccggatcttctcatttcccttggcagcaccatgaatagcgtgctgagcgacatggtaacgcgagacacggttgagaagcatcatatcgaaaggcgtggtggtgctaccctcttcaatatagcccgcgacagtgacacgctcaagacgcggacgtccaaagagcaagccctgcagctcagttgggtagccatggtaattgaaatgaataggcttatcagcagtgaagagggagtcgaatgcctcagtggacagggcatgtggatgcagaccctggttctcaagaatcatcaagtccgtcacgttaatgacacaaacacgaagctctggtatgagcttacgcaaaagcgccgccgctgcaatgacttcgaacatcacctcaacaccaataccgaccagcacgacatccggattaattccttcgtccgtgctacagaacttccagatcgaggctcctgcgcgacagtgactctcggcctctttgggggtaaggtacactggagtttgctgtttcgaacccaccatcagattgacgtagtttctcgactttagacagtggtgaacggttgtcaggaaagtattcgcatccggtggcaagtatacgcgagctgcagtgggcttcagtttcagcacagagccaatgaaagatgggttctggtgagagaagccgttgtgttcctggcgcgtccaagtactcgattcgatgtagtttatactactgacgctggtgtgccaagttgtttccagcgcctaaatatttggtgagcatagaattgacattagcaagggaaaagggaagctgaccatcttagtgaactttgcatactgcaccatcatcgtatgaatgatgccgaggaagctttcataggacgggaaaataccaatgcgaccggtcaaggtataaccctgcaggaatccttgacacatgtgttcgctaaggatttcaattactcggccgccgcgggcgttggagaactggtcccattggaaattgcggtttgtgccttcaaacacctcatcgagcttgttgctttccagctcgtccggtgagaacaatcgcacgttcgtcgggttatccttgaatgtctgattgatgaaactgccaatcactttcatggcgcttgcgtcagagcctttctctacgcagaagggcctccaatctggcaaattcggtcgtttgtaaccattgtaggcttcaatgcgctgaccaagcttctttttgtcttctgtgggaatcacagacttgatctcgtcaattacatcaccggtcgaagtgaacagctcgtctggtttgtaactagagagccacttctgcagcagatcgagttgttccttgtctgtctttgccttgggcaatggcacctggtgcgaatggaacgagccctcgagaaacatgccatgaacctccttgggccccgaccaacccttgggagtacgcagaatcagcatcggccacctcggtttcatgatcggcttcccagaacgggcagccttctggatcctctggatctcctcgatagcccaggtcatggagaagtgcaaatccgcgtcaatattattgagatcctccacgaagcgaacctggtacccatacccactgaagagagccacaagctctttgtggtccatgcacccaaagattgtgcgctcgctgattttgaaaccatttagatgcagaattggcaaaactgcaccagattccttgggatcaatgtacttgattgcatgccaggacctgtccgctatcagcgttgtacagtgcaaaggggaaaataatcgacgaacgtggcagtggcaccggtttcagcctctccgtcacccacgatacaaggcactatcagatcggggttgtccatgacagcgccaaaggacactgctagagcgtatcccagttctccaccttcatggatagcaccaggggtttcggcattgatgtggctgcgcataactgttagccgaagatctaaatagcatggcaaggcaaggcaccaacctaggaaagccagctgttgtgctaaagctcgagattagtttgtgcaggcctttgctgtctcgcgaatattcgggataaaatctctccagcgagccctctagccatagtgcggctaggattgctggtgcaccatgtcctgggccgacaacgtacagcatgtccaggttccttgtccggatcaggtagttcagatgagagtagaccaaaattaggcccggacatgttccccaatgacctgggggtatgacatcagtcacgatggccgaattgaataattcggggatgctactcaccgagtagtcgaggtttgatgtcgtgaggtgtgagttccgactttaaaagagtattttcttgcaaaaatatcatagctagcaataagtcagtcgcgccgttgcaatatatatagcacataaccacaattacctgccgcaatgtaacaagccgcgcggcgaaacttgagcaaggcatcacaagctttttcatctagtttctcatgatccaacttgacgctcagtttctcaagataatctggtagatacgacggcagcgcagctggatttggttggtctataatttctgcaggcatgatgaatttgatatagtagggttttagtgacttgacaggagcaagagaacattgaatgagttcaagacacaataggtgaatgagtgaaaactacaagtggaattgaaagaaacaggcaaagaaacaagttgccatgaaacatgccgtgtacttcgtgttatcgacgtcagcccacacaccctgacatcactacggctaatccttcaccttttgaaattcgtgccgattttcaaaaacacgctcgacgcgataaaacaggttcaaaatgactaaatctatcctagctgttaacgcgggttcatcttccgtcaaaatcaacttctataccctcgagaacccaccgagacttatcgcagatgcgtcgatctccggaattactgcacccccaccgacattcaagtaccacaagggagacaagaaacacaaacaggaggtcaaacaaatactcagcaccccccaagatgcattcaagtacctcctgcagcgctgttttagcgaccctgagctttcagaagtcgctagcatcgacgatttggagtacatctgccaccgagtcgtccacggaggagactacctcgacgcagtcctcatcaacgatgagacacttgatcgcttgaagaaattggaagacctcgcacctctgtaagctcatatatctcgagtcttcatatttccgggattttatacctggaatcgactatatacctgccttggtcaataccccgctaaccccgcccgaccaaaagtcacaatttctccgcgctggagatagtccgcctgtgcaaagcagagttccccaaagttccaagcatcaccttcttcgactcttgtttccaccagacaatccccgaagctgtccgcacgtacccaatcaaccaggaaattgccaaggccaatggtctgcgcaagtatggcttccacggcatcagctactcgttcatcctgcggactgtagcacaatttttgaacaaaccgaaggagaagacgaatcttatcgttatgcatatcgggagcggggcgtcgatctgtgcgatcaagaacggagagtcggtggatacatcgtgagtcccgcaaagtttatattgcatctcaatctatctcgagttgagagtcgtgctaacacggtgactagaatgggcctcactcctttggcaggattacccggtgcaacgcgtagtggaagtattgatccatcgtgagttacatccaatgggctttcttggcaatgaaactatggccaactaatacttggtgatctagattggtcttccactataccaacgaagcaggccatctaaacccaggcagcacgacaagtatgcatattagcacggtatgaatacccaagaaccagtgccaaaaaggagagcaaggaaaatactaacccaatccaacaccttcaggctgagaacatcctcaataaacaatcaggttgggaagccctcacaggaacaaccgacttctccaagatcgcagtggcgaatccaccaaccaaagcacataaacttgctttcgatatcgtcgtcgaccgcatctcgggctacatcggcagctactacgttaaactaaacggtgaattagacggtgtagtcttcgccggtgggatcggtgagaagagtgccttgctgagaaaagcacttgtcgacaaatgccagtgtctaggcttggcaatcgacgatgcggctaatgacaaggggcctggagatgatgagacggtcaaggatatctccaaggattccggcaaggggccccgggttttgatttgccagaccaatgaacaggtatgtggtctcaaatattgaggattattgaccgtgaccgtaaccttgacctctcttggaggtgaaggtttaggttataggttgttttgctttgatttactgacttgggatttcacttacagtttgaaatggcataccactgtgcagcttcgaggagctgatttctcatgcgcggtgtctagttttgttattagtttcttcttcttttgctattagtagcaacaatagtatcagtatctaccttggtagttaatagaagaggttggggggttgaacatggttggattacgacagatataaggttctctacattgtacacctgtattccgtacatacttaatcgatattccaaatagttaatcgaaatcagatccaaatattaaaaagcaaaaagcatgtaacatagttggctcttgtcactgagggggggaaccctatgtggctgggttgacaggtagtctccgatgggtcatttcagccctggattgccaaccccggtgattgggaatcgggaagggtgcagtcccaggtacttggtcatatatttacgcctctttcaatgcaatgcagcctttatcctttatcattcctggtacgtgagttctgcaacagcatacagtaggtagggggagaagagaggcctgaggacacagtccctacataccagcgctagcttgggttactttgctgtggatcgtgtaccccatactccgtacaatcgaacaggaaatgaaaaatcgaaataaaggggaaatgtaacctgcagcaggagtgaatgtgacacatccaggttgtcggatttgatagcttcggggggaggcacttccccggttctcagagttttcgattgtatgcaggaccacggcaagataggtgattgacgcgatcgagggcgatcgcctcggggaagatcgaggtctcaattgtggtcctggtagctctgatgatctgcaggttagcgggttcagatagcacattgcaattcgcgaagtcaacgagctagcgaattaggaggcgcccctaggtcgactaatcaatcttgcattgctatctagaggatcagacatcaaatcaccagtgatggcgtccaagggctaaggccgcattgcagagatcgacactgcagaatgcgaatgtacttttgtttctttggctcagcagcgtgtcatacagctgcacagtatactccgctacatgtcaacatatctgcatgtacacagtacagagcgcgtgacgcaggaggtatgtacgatgtacttcgatcctcaggcatgatcccccgtgcaggagtacctcggggaacattactccgtatccgttgacacacagcaagtggccgcggatcgcccgaccaaaagccggtctatatcgacgtgggtcgtacctgattgtatctgtgtggctcgatcagtcataatctcctccttcgtgcgtcatgtcgtgacaactaaaataggtccaaagtaccgaagtcaggggttgacccagggaaaaaaaagaaaggggacgatcgaacccggcacactggtgctggagctgtggagctgacgatcgtcagttttggttcttttctgcgagttaatcaggtaacccggtcattgatgtgggtatgggcctgtcacctcaggatccaaagagtccagagaggtctaaaaggtcagtccacttttttttccccttctttgttcggctgtgagctgccgtcgtgtctcatgtttcgggagtcgaataggaaggccggaacttggtggaggcgaaacgatttaccaaataaaaaggagaagctaggaattgaggcggctgaaaaaagcgtttgtctcgggacggggaagcggttccagttccaactgattggactttaatttgcgttctatttcttcttttgtccttctattcgacccatttggtccctaaatgccattgaataatagcggagtaccaacggaataccgactgtggacactacctaagtatagcccgttacaaccatcagctatggagcacatagtgcttccagaattttccatctatggagccttcctttgagagaatcggaaaaatgaatgaagatcgcccggcttcacatccgcggcgtcctagtgcgctatttccctgctcctatccatagtgacatttggattgtacgttgtaagagacgactccaacgccacacacccagaggaaaaagtaaacaaagtcgagtcgatatcccaatttcaggagcgataacacatccacatctgtcaaaaagcaaagagtccggctggggcccgatgcatccggaccgggaacccccctgcatcctgatgcgctgcaaggcaaatctccaagtcaatgcgggtggtgatccgcgaccgttttgtctcgatatctcgacgccacaatcaaggcgtatgcgggtagctacgatttccagattcaaaccaaggaatgtacttttgagaaagatcagtgcaagataaatacaacatacaacagtgtacgtaccatggatcagccccgggaagactaagacgttccggaaacgatggaagccggttcatgcaatcgccccaaccttgttttcgaactaatgcaccctccctagactttatctcggcttagtacatcatctagaaccttggaacatcgacaccgtatgaaccgtcgtcttgggtcatgcaagatccagaatccgttgggttcggacgtcattcccaacgaggaaaaagggggagaaataccgaccaaggctattaaggttgactgtgagaggattgagctgatggagctgatggggtcgatggagtcgatggggactgatatggggactcttgtttttctcccggttctagcgcccttctagctgtaattgaaacggcttctttccgtacgataacagttcagttccactataggaagctggatcataggctttttttctttttttttttttttttttctggattaggacatggaaatatgtttttacacattagggtatgcttgtgacttcttttcctcaaaaacagttgatccacacgatgctctccagtacggggggaagtatggagtagttttcccctattttgaacatgtggaaacgtgtcactgggagatacgcctgagataaagacacgagagagaatgtcttgttccaataatgagaagcgtaacagagcaagccacaatgctaggatgtagaggtgagatcgatcgaacatggttacgttgagaactctgaatctcttaacggtagccatgtacggtagatcttccagcccccgatttccacgaggaagacccagattcaagacccgcgggagaggaagttcctccattcggtatggtgtggacacgggctgaaacacgcctacgagtccctttcacaagcctagaaggtcgttaatgtgaaccctgtcagctgggggtcactataccgcaagagggtgattgtggctgaccgtggtgagatgtgtcggccccagtgtggcaaattatgagagcggatgcagatacccttgattaccttccagagcctagattatggattatgggggtggggcttcctctccgaatgtttctagatgttatgtgtgatgtacggaggacggagtacatcctgtacaacacctgcggacaccaaggttcttcattgtctctacccagcgtgccgggaacgaaaagaaaggctagaaggcgaaaagaatgttcgtacgtaaccgagacgggattttactttttcgatcattacgggggccctccttttgcttagtgtatctccaccccctatgatggagcccaggatcgtaaagataatcctcttttcttttttttccccttcttgattggggcgtagggaatcatcagatagacacgccgggaatgaagtcaaaattccgatatgttggaattgcttttgataagtcttgtgtctggttgattgcgaattgtaggcgaatcgacgaggatttgatcccaagacttccgggaccagacccgaagtttgcgactggtcttactaagtgaggattgcacgggaggccgcctgaaatacggatggccttaattaatagccgaaatacccttggagggttggattatttgcatcatatgtcataatccgttcgctgttggggttgtagtttcttgcctcttgaacaacgcactctggactccatatacatacatcatgaaaacgaacaacaccgatggagccacgaccacgcgagaaatatagaaattaaaaagaattaaatccaatgctcggagtgatccgtttctcgttcctgcggctgtttttcccttttctgttctccacttttgcacaaaggctgcccggagatttggttcctagctttatagtggagagcttctatggctagttgatacataatagagagaggtctggacttctgggacctgacagtagtgaagacctgggttggatgtatctcgtggaattgtgatgaatccaagggtacctttttagcttgttttggtgtcataaaggaccaaacaggcgctatagattagaacgtttggagaagaaaggggggacaaatccgttccctattccccgggaccagggacgggagagccgctgtgctaaacaaagaaatggaaatatagaaaaacatagggaaaatcaacaaatcaacaaatatatgaattatatcgaatataccgaatatccaatatcaattatatactattattttcttttcctctttcgatttattatattattaaaaggataaatctaattttgattccaatgcctaagggaaaaaaaaccgtgtatatcaacgcaaacccccctcccttcttgtttcctttgaacatacttgataaccatctttctacacatccacccccctacagccctcctttgctctcccttctcccttgcgatacgtcgatttgaactttttccggatcgaccggagccagttccggagcactttctccttggctcccttgccgtcttaaacctcatatcccttctgcccgtttttcttggttgggattgcgactttttttttttatggattcgctgcagccaccctcgcgcgcatcattttgaatatttcgattattccttgatttaattctccatctctctactcataaaaagcaacgagctgcgacctgtccaccgactcgcttctctccccaaagactccattctcatttgttgggcttcgtcacattcctgccctacgatctgttggaacccgcactggtgccagtggtgattcttcaaaaggaccgacttttccgatcccgactgcatctgcatctatcgcctgcaccgctggtttttatctggatctgattttattctgttaattcgattttctcaactgggggttggattggcatttcgtttgtccgcgcttgtttccccaagggaaacatctatataagatcctggcgtcgacgtcgtgtttacttggtaagtctttctacctcattccccactctctgccattagcgccttggaactcgcacatctcttttctaccaaaattcctacctttcagcatctaaccatgattgcctctgcagacctgaacatgatcctgcgggacctatctgctttcaacatgggaagaggagcttacgatacaactggcgtgaagaagcccggcgtgcctccaccaccaccgaaataaatccattcggaaacatacccttcgtcatactcaacattgctttctacaccactcggtcatgtttcggatggtctggcgcccaacagcggctggagttctctcttttttattttttgacacatgcggtttggagttttacgtgattttggtaagacatgtccactccgagcacacctttgggcatcaaaactaaccgaattgccagagatctgtaacactatcttgttgttcttcgccccggtcacgggtcatacgtttttctcgcctattcgctacagacatcgcgcgacaatataccctatttaattttgctcgactttcgccagcattttcttttcggataccaagcgttggcacattttctccccctctttccgaccttttgatctttcgtctccgcacatgagccttatccttatttttcgggccctcgaaccttattccgcctaacctcacgttcttcacctcttgacacgaatcgataccacggtcctatttctctcaaaaaagtgcctttgtttttatttgtttttatttgcatctcttttgtctctgtttctcgttatcgaccggcgttttggtatagacgggatggaatgttgaatgggatgggctgataccaaaatctagagcctcgacctcacggtcaatagcatgctttgattgctttcttgttttactattggatgggtacagctcccgggtttatttgcatgagtatttgtacttttttattttgacgttgatgcctgtgtataatattttgcgcacaaaaaccataattgtcagcgccaatggattaatttttctctacattctctatctagccagtctagaccaccatcgacttcacttgcagtcatagatgcgctctgtaaccccgagtttgcaaactcgcactcatctcacgtcgtacttcgcttgtacttgaccgaccgcggttgcgctagcatcgggcagatttgcttgccgactaatgccgagacaggaacgacagcccgattgttgatgcgggcctagctagtgcgtcgggatattcccgagcctgaccagggtctttgctaactggcgcccgacatcatcttgcaggccagctaggctagtgcccaatctgcgacagctgtcaaggtgccaggaacctgtttgtctcccgctagcctactttttatcaagtcatagtacacgtatttcgatgcactctttttcaaatcttcatatccatgttatctgcatgccatcggtgcagtgtatccaatgagatgatatgaaccatgctggaaatcctggaacatccaatttaggtctgctgtgagtttctttaattagatacgaagataaactaagcctcaatagaagtatgagcaacgcaaatgcaatgctaggtgcatatgtcagttgtatacttcaaccttggacaggcctccccgtgactggtgactgacgaccgcgctaagcccaatcgaggcacccatcatcatcatccacctccgcctctctccaacttcaggttcaatcacccttgtttcgacaacgtctatactacgctttgcatttctcattcctcgaccaggatttaactactttaccaatactaggcacaagcaacgcctcgtgtcccgctgtcctacccccagacagccccattcctggcactgtggctactagctgaatccacctgccacctcatccggtcgcctggtcgctgatcgattgacagtgaataacgcacagaaggacgcctaactgtcacctttgctcttaccgtagtttcgttgtctcagccatgtccgaatcagcgaacgcaaatgccccgaagccgagcagcagcgtcaagcttgtgctgctcggagaggccgcagtgggcaaggtactgctctattcgtcatgttacatgattttgacagctaaccgtctcttgttattcgcccatagtcatcgcttgtcctccgctttgtcaacaatgatttccaggagaataaggaaccaactattggcggtaagatttccccatggacttagccccccccccacaggatacaaggtactgttcctggcagatcataaactttttggagaatccagggacggtgtgttgtatccaaaattgagttgttccccgcaaacggggcaacccggccccttaataatactttgcactagaataaccatctaacgtcgtctttccagctgcttttttgacgcaaaaatgctcccttcctacgcgcacgatcaagttcgagatctgggacaccgccggccaagagcgattcgcttcgctcgccccgatgtactaccgcaacgcacaggcggcgcttgttgtctacgacgtcacgaaaccctcttcgctgacaaaagccaagcactgggtcgccgagctgcagcgccaagcgagccctggaatcgtcattgccctcgtcggtaacaagctggacttgaccaatgacggcggagatgtttccgaggccgttggcgctacacagagcgagcctgagtcggcccaaggtggagatgaaggtgccggtgaggaagacgaggggcaggatgtcgtgtccggcgatgctcgcaaggtatcgacacgagacgctaccgcctatgcggaggaagagggtcttctgttcttcgagactagcgccaagaccggaaccaatgttgtggaagtcttcacggcaattgcaaatgccatccccgagagcagtctgaagactggtcgcggtaccggtgccggaactggtcagacttcgttgggtaatcggtcagcagaagactcacgggtcaacctgggtgatcgaaatgctgctacggctaaggaaggctgcgcttgctgatttgggtcttttttttggcagatgtttttgcaattatttccatggatacgggcgtccttcttgctttttttgttgcttgttccggtttcgatggagactccgtgtgctcttatagtacatagtgtgctactctccctgcagcacctcgtttcagcaatgattagagtgtaaatttttgagattggcattggcaatcagaaatcatctccagcgtacctacataccgtgaagaataagacaatatggccagaaagagtcccggggtagagttcttgactaaagacgagtcggatagtggatccccttcagcggcagccccccaatcagcaacgagccctaagacggacacgctaaactaaaacaggaaatagcgcgccctaagcgaatgcgccgatcccacagcaaattcccattcgattcaatctgcgaacctcccctccgtcgacatcaccaccagcacttcccgcagcaccccgtcgctcgcaataatggctgccatcaacaagatcgcccccaactcgccgtcccggcagaacccctccgagctggagaccgcgatcgccggcgctctcttcgacctcgagagcaacacacaggacttgaaggccagccttcgtcccctgcagttcgtctctgcccgcgaggtaagaattgttgtccgaggctcccgacatacggattgaatcgttctggaatggcgtctgtgaattttcgagggattcgatgctccggggtatattggttgaatttgtggattgatttcaattcttatccaccaacaccaaaaatcatcaatatgcagaggaatcatcaacaaaaggaggcaatatacaaatggatatgaaaattcgcagagcaagacgccgttccaagaggaattctgtttctgtgtgcaggacactttcaaccggacaacgctctgacattattctcgctatctaggttgaggtcggccacggcaagaaggccatcattgtcttcgtccccgtccccctcctgaacaacttccacaagatccagcagcggtaagcaaccaccaacccttccaaccccaatgggccaaccgaaacaaagccactcaaaccaaagaacaacccggactaacacccgcctccagtctgacccgcgagcttgagaagaagttctccgaccgccacgttctcttcgtggcccagcgccgcatcctgccccgccccaagcgctccgccaactcgcgcaccacccagacccagaagcgtccccgctcgcgcactctgaccgctgtccacgatgccatcctcaccgacctcgtctaccccgtcgagatcgtcggcaagcgtacccgcaccaaggaggacggctccaagaccctcaaggtcattctcgacgagaaggagcgtggtggtgtcgaccaccgcctcgatgcctacggcgaggtctaccgccgcctcaccggccgctccgttgccttcgagttcccccagagcggcgctgagttctaaatgcacatttagaattctttgttcactttgactttttttggggctagggggcttggaatgtgctcggctgatgcgtgggagaatggcattgtttctaggttttgaattgttgcttagattcaacgccattgatgggttccaaagagatgatctccataaaaaatgcattgacggttttttctcttttctttttttgcccccagtcactggttgcattgctttgtgtgtccggtgtgagctctgggtgaggcgatggagttgagttctctctctatctcccgatctaatgagggtgggatggaatatctgatagtattccaattcaacgattccgacttttcattgcttctttagatgttttgtctaggattggatctagcctgctggtagattataggcttgattacccctggacaactagatattgttggataagtagctcatctgctgttattgacttggcagtatcagacccaaacgtcactagacgatatgtattatgcgatgcttcatgaacgggaaaaaggtacactcgggggtatgaaaggtatacaacgcaaaccagtcgacgcaaaatatgaacaaaacaatgacatcccctatttatctacaacgaagcctgaattcttcccacaccaagcaccatccaatatgccaactccctggtaaccttatcatcaggcttagatccctttccgacattctgctgatcaagctgtgcatccgcatcccaatccatatgcacgaacaccggaatctcaagcacatcctcatcctgcctggaagccgcaatcgccgagacatccacatcattagtctcggtatccgcatcgccattgccgttttcagcactactcccaggcaaggtaccagggacaacctccaacacgacggtcgtccagttccggcccttgtcccacaccttgcctgcctcggggactccgcgttgagcgccggagcgagactcgctcgttaagggcgcagagccaccctgcaacgcctcgtcccagacatcgctgttcgcgccaatctcaaactgcggagagagaactgtgactttcgttgcaacgcggcctggggttacggggggcgtggcgagggtgatgcggacggggtcgaacatgtggttttttagcgtaagaaggacgtggattgggcgcaggggtgggagggagttgaggtcagaggttggggccatggctgggagggctgacgtggaagatagggccagagggcggagggttggaagggggatgtagctgagggcaatgaggcggatgcggaagcgagtagattgcggcttgctctcgggcttcacgaggatgtgcttgcaggacttgcagcgcttggctcgcttggtgcggagaaggactgggagtgggaggagatcgtcaacgaagcggacgtccggtgattgggttgcgcgctggtctattgaggccatgccatcccagccacattctggagactgaagtcgtgcaataatgtccgcttcgttgttttctgaagcgatcagaaggccctcgcttgcagtcagagcttcgcgcataacaggtggcttggatttgggcttcttattgccgccatacagtccgcttagacgcgacgaggtcgtatacagagacataagccggtttagggcgcctggcgaagagaatccaaattccgagctaagacgatcatttgctgaatttgatgtctccgcgatttgtgtacgatagaagttcttcagggctgcgaaccgggcatccgtgcccattggaggtgcagccgggtcttcttttgatgcagcttgctctccatctcgctcgcttgcgttggattgcccatcaatagaggcatagctagacaacggatgtttcagatctccataagagcgagaagcttgcctcgagcggtcgaaagaagcaggggcagtggaatctgtcatcttttgcagttggctgcggatattagtcggcttgtcgaatttgatgccaatgtctagtgttgtccaaagacagtatccgcaagacaacacccacggaccctgttgaggcccgttcccggtggcattctcaatggtactcacagccagcggggccgtacagacaggacaattgaagcaatttcggccacacctagtgcgtgttaacggatagtcgaacacaaccctttacaccctagtacataccgattgccatcactccgcaccatactgctcggcgtttcaaacaagcagctaggacaataccagctcacaatctcctccgtgatacatcgggggcatttgatctggtgacactcctcgcagtagagaagctgttcaggcggatacagcgagaagttggaccgtggagagcggggatcaaatgtgtgctcttcatcttcgtcctcttcttcttgttcgtcttttgctgacaatttcttgtcctgatctgtattcgcttgctccggtggtggtttctgcgtggactccctcgaccttcgcttcctagccggatcggggaccggggtgtcggcgcagggacatgatatgtatgtatatggaaaaggacgtgacattttgatattgacgtggaggagcgagcgagatgttatgtggtagcttttgaggtgtgtacttgggtcaattcatgactcgtctctgtggggtcgagagcttcgtaatggagtaaacaggttgactggtagcaaattcgtatcttttcgagtaaaaatattttatttccaggatcccgactttgttgcgccaaatcagaccctgagcggagcgtgttggcgcgtgggaacttgttggagcagggggtcacaatggctctgccacgcccaatgtactatgcacaatatagtcaatatgcacaaagtagaaattaaaaataattccaggccaactgtctccaaagcgccaattttcaagaagtccacagtttgcggagagggagctcttccgcatcaacaaccgacgtcagatcccgccattttctgcccgccatcgccgcaaaaccatggacttgcatgcttgaaggtgtagaatcctccatatccattccacagccacaatgatacccctacgaacatttcgtgcaagtctctcaaggcaatgctctgctccaacaactactatccgaaaatatgccagccagacgcctggtaacccaatgcttgaggtcttcaatcgcaaagccaaacacctccaaaaagatcgggcagcccggaatgtcgaacagagtcggaatgtcgactacctgaaagatgaagtagcaatgcggctatgcgagcgcttactggtaagccactcaacgaagcaagcgcggacaatagtgcaaaagtagaaataggacacatcaactgacaagagcttctatcaccatgaataggacatcaaacgtgactttccaaacgttctagatctaggcgcaaacagctgcaacatcgcccgagctctcacatcccccaatatcgactcagccatgccggaaggaaccatcacaccaccactatcaaacaagatctcaaagctcacatgcgtggagacatcgcgcgcactgctctaccgcgacgagaacgaaccgtttaacaaggagatcaacattcagcgggatgtgattccggacttggagacgttgccgtacgcaccgaacagcttcgacgccgtgctatcgtcactctcgatccactggatcaacgacctgcccgcgctcctggaacaggtgaacacaatactgaagcccgatgcgccgttcatcgcggccatgtttggtggtgatacgctgtacgagctgcgcgggtcgctgcagctggctgatatggagcggcgcggcggtgtgagcccgcatgtgtcgcctctggcggatgtcaaggatgtcgggagcttgttgagtcgtactgggttcaagatgctcactgttgatgttgaggacattgtggtggagttcccagatacctttgcgctcatgcaagatttgcaggcgatgggcgagggtaacgcaatcatgaaccgtgaatcggcaccgctttcacgggatgtattgttggctaatgaggctatatatcgttccatgtatatggaagaaggtgcgcgtggtatcccggcaacgttccggttgatctacatgattggatggaaggaaggcgagggccagtcgaagccgttgcagcgtggcaccggcgatgtcaacctcaaggacatcctcgagggaggtgactttgataaaccataagcaatggaaacaaaagggcaaatagaaagggcccaatattttgtcacaatatactaatgtaaaaactacgcttaaggcgacacttgagagatatcatctacagacatgtatggaatgcaaatcaagcttctaccaggaagacgagaacaaaaacagtcagaatgtatatcataagaaacgaacctccatccgatgttgtttgctccgctcaaaccgtcctacgatcagtcatgacccgcacaatcgatccagtaccagcaatatccacaagcctctcgtgccagctcagcaaaacgctcatctgctgcccaccgccaccttcacccaagttgcgagcctggatctgcgagaagcccgtatcctgaggcgaaactggcttcttcggcgactgggcaccgctaccgggagcagccgaggacattcccttgtacctgtaatcaataaatcagcaatcaaatccatgactttccctccgacggttcctctcctggcaatcgagatagtagttccacgtacaggtatttcatcaagcaatccgcccgctcagcccctccatccccgctgcacacgccctccaagatgcgtgtcatctcgccctgtcggataccctgcagcacatcgataacggtagcaagatgcacctccttggcacggtcgtcgccgcccagcggcgcggtgtcgaggacagtccgcagagcgccctctgggtcaccgccgcgcagcatctggcgcacctgtgttgcggcattggcggcgtcactggcacttgcgggttgggggagtgtggcggggaggagggattccatggggaagttggccgaggactcggggtccagggcgtcaatgttgatggtgcggtagttgatttgcgacatggtagcggttggggtttggttgagggttgaaacagagtagcgttgggtctcgatcaaattttggctaagccagtcgaatgggtttggtgttgaggaagctttgtggggagctacctgtttccgtttggtatatcggtgcggtgggcggaagcggggagattaggttgaacaatgggaaggcaacaatgtccagataaaaatgtacatgagtataattgtctgtgggagctgatcgctctgagatctaacttctcctatagaatctttacataatcatggcacgtggctaaaatgtgccatttctagttaacaaccccctgggccggtatagtcgcctaaatgtcacgatgcagttgtacggatcatcgtgatgttgactgtttgtcttgtttgcttgccatttgcagagcggccagctataagcagattctaatatattccaatgattattttaatgcatattcaataagcagttcatggagcagttgatgaagtagtcgatgaagtattgataacaaaagggacttaattttgttagtggcttacatacaaattgcaggtacctaatgtcattgcatagggagttcgacacgaaagcggtgtataaagtaaaaggcggtgtgaagagggataggcagaaacagggtagttacccaattaggaatgtgcatctgaaaagtcaggcgggggttaaataaatcttcaatatatattgggagagtgctaagatatgatactaggatactgggtagaattgcatgtatcatatattctaggtacaacccatattggggtacagcatagaattggacccaagacccaaagtgggctgggctgggctgggttgggtcgtgggttgtgccgaagtctagttacttcgtatttaggtaggcttatagaaggaatagttttgggattacgtactaggatctagcgagaaatacgtcttatacttaggggtacgggagcccatgatcgtatttagatactctcgttgaataagatatatagacacatcttctatcaaacccagtgtttttttgtacaaataacacaataaaatatcaaacagccagcccaacgctaataacacaaacgctaaaatgacagctaaggagacgtagtaatcgtgatagggggaatgacgacaggagtaggcgtggccagacgctcaggagagggcttttgcgtgttcagttgtagtctctcaggagcttcttcaggatcagtagactttggtttcaactcgagttcatcttctgacttccgcttgttgaaaatacggcgagtgaaacgcttcacaggcctaaagaaagacctgatgcctcgaccgattaccttgcaccccttggaaagcgggcgcaaaacaacagccataccgccaacaacggcattgaaaacaagcccgaaatagtagtctgggataagtcggagcacgatagcccagggcaagcaggcaatagaacagatcaaacacacgccccagagggtgccgttcaagcgagtcacgttgaatgcctggccgcccacgaagacgatcatgacctggccaccgatcatgatggcgttgattcctaagaaccagtaattgcggaacatgccttcgaagatattgaacttgttgtcgaggcggcgattgttgaattcgttaaagatctgcatccacacgaacgtgttgaacaccacggtggagagttgtttcgcgcgcatttcgggctcggagctgagatgggcgttgaggagcttttcgcctgcgaaataaagcatgaatgtgatggctagctggtatactgcttggccaagaatcatcttccacatggtcattgtgaaaagggaggcgtgtttggagacaggcttgcggtcgagaatcttttcagtcggggcatccgtggctctgattttccaaaacattagcgagaggtccaggggaaatataagaggaaaaacacgacaacttacaaggcgagagcggcgaatgtatccatgatcaggttcacccagagcagctgcacagctgtcaaaacactggtgttctcgctgctgtacacagatgacacaaaagtgaggatcacggccgtgatattgaccgtgacctggaattgcaaaaacttggcaacggcgtcattaacagctcgtccccaagcgatcgctgtgatgatggacttgaaattatcatccaggagaataatcgaactcgcctccttcgcgacctcagtaccagcaatacccatggagaagccgacatctgcagtccgcaaagccggtccgtcgttggtaccatcacctgtcacggcgaccgtttcaccgagagccttgagacgttcgaccaagattcgcttgtcttcgggggatgatcgtgccagcacttgcaggcgcggaaccacttcatccatctcctcatttgtgagttggcggaacttgggaccttccatgaccaatccatcttccgtcttgattccgcaagaagttgcaatagcagtggcagtggcaacgttgtcaccagtcaccatcttgacctggacgcctgccgagtgacatttgcgaatggccgatgggacttcggggcgaagagggtcttggatacctacaactccaacccaagtcatatcatggaagaaatcctcgaagtttgctgaaggatcctcagaatgtttggcttcgatcggtggccagcttgcgaagtccttgtagactatgccaatcgttcgaagagacttgtgggcataattgtcgatgatctccagaaggtttttcttttgttcgtcagaaagctgctccacatcgggtctctctttggaaatatcaatgttgacaatttctgcggtgcagacgccgaccatcaactcggacgctcccttgacaagcagtcggtagccagctccaggaacacggtaaacaacacccatgcacttcctgtcggagtcgaaaggaatcaattgggtgatctcagcggagccacgctccgagacaagatccatgcccatataatccctagccaactgaagcatcgcaacctcggtcttactaccgacaaaatcgatggagccgtccttttcccgttcaaacgcagttgagttcaaagcgatgctcttgataatcaaatctttgatgggagctgatagtttctgggagatggccgaagtagtcattgaaccttccacatcttcatcttcggttctctggctgaagttttggttcgagccccaggttccggccacaacggtcattttgttctgtgtcaatgtgcctgttttatcagagcagatgaccgtggcgtttcccattgtctcgcatgcgcgaaggacgcggactaggttgttctccttgaccatacgggtagtagcgaaggccaaagccagcgttactgctagtgggagaccctctagcgaagaacatggatgtcagcagggctcagatgattgtagacatcagcacttacctggaatagcgacaacaataaccgtgacagcaacaataagaatatccacaaactctttgcctttcacagcaccgttcctttccgggtgattgggcagatcggctacaaatcggaatagcaaaacaaagaacagaataccagcagctctgtctcaccatcagtaacctgtacaacaaaagggaagtatgaaagtcaactcacgctgtacccaaatacccaatccaatccgccaacttacccagcttgacttgaagcggcgttgggtcattaggagtctgcagcgacaacaagatccgtccgtaggtagaatagggtccaacactggtgacaacataagttcccaacccttcaaggaccttgctaccggagatcagaaacgggtcgagtttcttggttgccttgccgtcgacaatttgctgccagacttcatggccaggggtcttcttcatttgatccgactcgccggtggcggaagactcatcgcacttcaccccgtagcctgaaactagaattccatctgctgggatggaatcgcctgcctcgagatggaggatatcgccgaccataatatcgtagattgaaaccatgtcgggtttgcctgagcgggtgacttgaacttgacggtcatcgttctgttggcatgttagctgtgctcagtttctggattgataggggaagacctgcccgtttattgagtttggcaaattgtctctctttttgccaatcgttcgcagctgtgacgattgtaacaatcaagattgctacacagatggcgactccttccacccactggacgcctgtgccttccgacacggtctcgtatatccccagggatagcgagacaacggcggcaatggtcaataatataataattttgtcattatatgcagcccaaaataatttcaggaacccggtcgatttccgagcaggtagtttgttctgactgaagacacgaatgcggtcttcgaatggtgaaccatgaccagatgacaccggcgccggcgccgaggtgacaggttttgatggagatttttctgtagctgtgtgttgcgctgaaggtgccacatcctggaactcgacattgccctccagacacccttcatcaattgacaaaccggccttgagatctgttcgcagaccccgctccagaccttgtaagccaccaagagcatggaatgcagccaaggactttgggttctgcattttgtttagttgacccggggagaacgcaaaccgattatcctccacctggaaatcggcttcattcctcgggtccggtttcaaagcatccgacagcgagacatcgtcgtagacatctttggaagtatgggtcgggtctacctcggagttcgcccgcgaacgaactacggtatctgctgaagaagcgaatgaatccgcccgcggacgcaatgtatcgccatcgatcgactgtgacagtcgatgcgaggcattttgaaccatcagccgagctgggtctggtgggttccacgccatatctggtgagacaggagaagtcgggctgtgatttagatctgtaggacccgaccatgcggaagaggctgtagacatagatcgctggaagagaaagaaaataaaacaatcagcgacaaatttccagatgtttatagaatgatgaaatagcttgagtggcctacctctctgcctgaaaagtccgtcactataacaggactcaatagcgagccctgataggaggggtcattgtttgaagaagacatcgcacggagttgattccgaaaaggatatgcgaattaaatgtaaaagcggctcatgaagatgttcatgtaatacgatctgatatcaagaaatgtctcgtgtgccgccggggttgcgagaccttgttatctcttcccctctcaacggggctgtgtattccaaggatgaatgcccagagacgccgaggttttcgtcaattttccgctggcaattcgcgacgagcgttgtcgagatgccaagtataagagggaatattttattatccacctcagaagattggagcgatccagaaaacgcaaaataatatagactcttgaagtggtgccaggttgtgccacttattaccccgtacggcactgacacagcccccttcggaggttgcaagcggttatcttgatcacggagctccgtgtatgatgtagcggcagtgtcaggttataggggagggcgaagctcataggcatccatacctgaaaagatgaagaatataagcgctgggcttctttcctgtaactatgccacaattcttcatatccatgctacgtgaatggcgaaacgatgggatcagcagccgtcgaatagcgttacgccaagcgcaggtatccaatgcgagggcgttgcgcactcattgtggataggccaacagctgctgcgcctcggagatgacccaatcatttggcacattctcaccccgacatattggcattattgtttggccgtgagcgcaagtaaggaggcaaagacgagtctcttggcgtcatggtgtctgttctaggttgttggagatggggtaggtgtccacttgatgagcggctagactgtgcgcatcatgaatacgcggcgccgctgtcagaacctatcaagcacacgagagaaatgattattatttactttcgcaactcattacctaggtagtaatttgttgaggtttctaggtgaaaggggcggacagggatagctttcgtggagtattgtggcggtgcttaaaatatgtatgtggcgatcgcctcatactgtggctggaggctcatgagctctatgacccgggaggcaagaaataacttggtaagggcagtgcgataggtggcattcataatgggctcacatcaagaaaggggctactccgaggctcttgagtagctaggcagaagcagtacagcccgattttggtctcaggagtcaggacgcgtatgtgcgaattcagttgagcaaagacaatatcctaagcctcatctgacacaaatgctgagcagtacctgcggctgctttcaaatgtatgtcatcaaagttcgaccttcgatttaatgcttgaaattgttttctttggaagtatggctcgtttttgcgacgccgaggaataatctcgttcaactcatcaagcatatggtaatatctaatccaactgcagtagctagtctcagacaacaacaagatggacgtctgacatgtcagatgatgcagtccttgatattggtcttgccacgtggtcagcatgcatcgttggccatacagtggaatccgtgccccaaggcaaggtgttacacttgtgtcagttacatgtagtgaccagtccaagactgattcctcttggcagaagctatctatacgtatggagaatgcgtgacgtttcatgtgcgaagctcgatgactttagattatcttgattatccgagctgatagtgtttaggtcttgattcatacatgtatcatactaagacgaagtaatatatccacaatgatgcaaatgtcagaggtaagtgagaaaataatgaagagaaacgaattcgaacaagaagaaagagaaatagatgaatagaagaagaagaaagaaaataaagatggggggtatcaatagtgaaaaagagaatataacgacaaaatcacaatcaaagacagtagatgcgcttttacagcagcataaagaagtagatcagtaaataataacaataaaaaggtacgatcggggacaagccccggagtccaatgtcacagaaggcctgcgaccccacccatcacttcatttccgtcatttcacatgtcccatatcgcaacattgacagttactgatcaatgacctcagtaaagcgactgcttcgactcccgtcgaaactgtgaagactgcggccgagcccatccggccgcggcggcaggaacggcactgcactctggggttgtgcaacggggtgagccggtgtcacagtgatcggagtggaaacgttgaccgtattagagacagggaggtgcggaagtttgggccgtgtcggtggggtgtgttcctcgacctcgcgggtgtagtttgagtccaggggcacgccatatggcgaggttggtggaggagcatagaaggagggtgatccacttggcccggttgctggtgagggagtagggaagcctggtgcagtgggagaatcgccgtctactccgcccccatatccgtctccaccatgtgtgaagacgggaggaagctttctaccggaaatcttttggaacccgcgctcgctggagccagagtcgacagtgcttccagagcgcgttgttgccgtcgactggcgccagcgctttatgaatgcgggggcgaggtacctggccgtgaagagcggatcattgctttcgcgccgctcgaccatttctctagacccagcaccggcccctaccccagccgcagccccagccccagccccagccgcagctgctgcgtctcctaacatgttggggcgtcccgctttacccacaagaaatcctcggcggcggaggtagtaaaataaaagaaaaagaatgagagcgagaccggcaactgatcctactacaccacccacaattttaggtgtgtcgggattgcttgtcgaatcctgccctaaagcgtgcgtttcgcttgaagttggcgcggttcctgtgccagttgctgagccggttgacccagagcctccatatacacctgatgaagaggttgtctggcttgtgctggaagccgagctcgtcgaggagccggcgctggaactgaagctggagctggagtcggtgccggagctggagttgatgctggagctggagacggaactagaactggcgctggaactagcgcttgaactggcgctggaaacagagccggaactgaaactgaaactggaagcggaagcggaagcggaagtagaaatgtaaatggaagtggagttggagctggagctgaaagttgagctagagccggagccggaggagcctgaatatgaccaataattgtgcgcctggggtgatgttgtcgtaacagaaggtgtagagctagaagaggtgaggaggcgagtcgaagtccctgtaagcgaactggtgattgtggctgaggcagatgctaatgatgatgtaagttgactcgtgcagtttgtggcggtcaacgatgtttgagtggagttcgagaagcttgaaagcgacgttgcagatagtagttccgatgtcggctgggtaggagcaggcgtcggtgaggttaaccctaaatctatagaggcactcgcactcgcactcgcagtcaaacttggactcgcagtcgtacttgcaatcacgctcacagtcgagctatccgagctcgatagagtgtcagtggcgtaaatagaacccgatatcgtcgtcggaaagtaactagtagtcgaatgaaaaggggtttgtgagctagcatcgactatctgcaatacagtactgatactagtcgggtcgacggaggtcgactcgtcccccnnnnnnnnnnnnnnnnnnnnnnnnnnnnnnnnnnnnnnnnnnnnnnnnnnnnnnnnnnnnnnnnnnnnnnnnnnnnnnnnnnnnnnnnnnnnnnnnnnnnnnnnnnnnnnnnnnnnnnnnnnnnnnnnnnnnnnnnnnnnnnnnnnnnnnnnnnnnnnnnnnnnnnnnnnnnnnnnnnnnnnnnnnnnnnnnnnnnnnnnnngtcgacggaggtcgactcgtcccgcttttcaaatattgagtcggattcgtccatgtcatgctcaagacacatagagtttttcgagtcgcaatcttcatccgcggggatatccgatgcggggatgatgggggtttgaaaggaatcatcctccagtaaatcagagcctgcatcctgtccatgaagctctgcttctaggcggcgcctggcgctaattagattgccgatgcgcgagtgacggaaatgaccatgagacatgttgacagttttccatacacgtcgtcaattgtcaatcacatgcaagtatcaagcaagaccgaagacgtatgatcctcacagaggttgagattcgcagtattgcgaagaacgggaccgataaggtttgagtaaacgaaagaaaaacacgtgctagcgtgcgcaaagttggggtagaaagattgatagatcgtcccgagaaaagaatgacccggctgacagtatgaatgaatggatgttggcaaagcgtagccaagcgatgtgtggatcaacaagaaaagcgcagtatggacagcaggtcaatgatctcgcgatatatggcgcacagttacgtggagggaatggcaatcgaacagacgactaggcggagttagtatgggatggattcaattgaggccccacgccatgtaagcaagccagaccgaagacgaccaacacatacctggagtaaacgagtgacgagaagagtggaataaaaagcaagagcgcagtctcacgtcctaatccattgtgttttggatatctggtgaaaccagagcaatatagagtgtttaatatgccgcgagagtaagcagatgcaaatcgacagctctgaggggcacactggcacgatcttcgtcgagaggaatgaatatacacgaaatggcaagcaaaaaaagacccaaaagtaaaacacacacaacaagaaagagaagcgaaacgggaagatgaaggaaaagacccagactggaccaaacaatcccctatcgaggcctagtctaggcgacccgtgttagtgacgaactaggctcgggggccgacagatcctttcttctttttattttcttcccttgaaattcggggaatagtatctgcaattgacttctgacgatcttttttttttataaaacgaagaaaacaaaccccaagagcagaaaaaaaaacaaaagccaggtcgctctccacgcaggtaccgccaggtaccgcgggagtcgacgaataaaaagtgacgaggccccgatgagcttctgaccaagggcactaggctgttctgggattagcctaccatgcaggtttaattatcatcggcttggccatcgaatggttgtatacataggcaagggacaagggcgacgtgcgtcagtgaagagattatatctttgtataaatgtctcttggtccattcaatctttcgaggaaaaataatgtgccatggtgtacggagtaactacggaggcacacactatatggagcacttacgttgtgctaacggacaatcattcgccgatcccattctccataaacctattttaagcctaggtgtcagaccactccgtgaaaaaatgggatgtatgcatttgactccatatctacgcgctcagctcgtcttatttgacacccgcaatggaaggaagacaagaaagaatagaagggggggtatttagtaacgggctttcctcctcacgggcctagaacacattttttcgcttagaaagtctcgagctcgtcggctggaatctcctctccttcggcagggatctcgaaaccgtcctaatggggggcgcacaggcgtcagttgggggaatcctcagggaataggtcaagggaacggacctcggtcgagtatagaatgccctggatgtgcttaacaagcgtgtcttcttccttttcaagctcggggtcggcttcaatggcgctctggagcagcagctcaatgtcgcgtagcttggcgaagtagaagtcgcgctccttctctagtcctgcgatcgcttccttctgtgtggagatctcctgttgcagggcagcggtggccgccnnnnnnnnnnnnnnnnnnnnnnnnnnnnnnnnnnnnnnnnnnnnnnnnnnnnnnnnnnnnnnnnnnnnnnnnnnnnnnnnnnnnnnnnnnnnnnnnnnnnnnnnnnnnnnnnnnnnnnnnnnnnnnnnnnnnnnnnnnnnnnnnnnnnnnnnnnnnnnnnnnnnnnnnnnnnnnnnnnnnnnnnnnnnnnnnnnnnnnnnnnnnnnnnnnnnnnnnnnnnnnnnnnnnnnnnnnnnnnnnnnnnnnnnnnnnnnnnnnnnnnnnnnnnnnnnnnnnnnnnnnnnnnnnnnnnnnnnnnnnnnnnnnnnnnnnnnnnnnnnnnnnnnnnnnnnnnnnnnnnnnnnnnnnnnnnnnnnnnnnnnnnnnnnnnnnnnnnnnnnnnnnnnnnnnnnnnnnnnnnnnnnnnnnnnnnnnnnnnnnnnnnnnnnnnnnnnnnnnnnnnnnnnnnnnnnnnnnnnnnnnnnnnnnnnnnnnnnnnnnnnnnnnnnnnnnnnnnnnnnnnnnnnnnnnnnnnnnnnnnnnnnnnnnnnnnnnnnnnnnnnnnnnnnnnnnnnnnnnnnnnnnnnnnnnnnnnnnnnnnnnnnnnnnnnnnnnnnnnnnnnnnnnnnnnnnnnnnnnnnnnnnnnnnnnnnnnnnnngcccctccactgggcgcggccactcggggacggacggcgcccgttgttggggtcaccccacggcgtgcgctgcttgcagacggggcgcgcgaagcgggggcggcaccaacagcgccggaagccttacgccggccgacggagtcgtattcaccaccgggatagtgctggtcccagtatttcttaacccactggaggaactccaggttgtcctgcatgcggcacttcgtgagggactgaacgggaatgggcttgttgacctggtgtcgggcgaagacgtctggatgattggatatgttaaaagggggatcgttggccgatttggaatccgccttcacatactctggagaatcttgaagttctgaaggtaggcatattcagtgttcacgttgaatttgacccgggacatgggaacatccactgaacaaagagagaaaccagtcagtatgtatcccgcaactcagtacgggcccgtttctctcgactattgcgccggtcgtattgattacatactgaaaatcgaatcgaagacctggcagagggcagcactatagaggaagataggaggtcagcccagctgatccatacaaaagagatcgccccgcgggccttttgaaagtcggggagaatctcgatcaaaccatacccagttccacattgctcaatcttggtaaggttcagctgcagcaggttattaagccatgcgagcagttcctgtctgaatcataaagcgatcggcgtcagtaaggccatatcggtcgcgagatggcggggaataggagaaaagtcgaacctggattcacccatgatggtggggtagaataataatcaatcgaaacactagaggagaaaataagactgggataagcgctaagcgggaaaagagctggatgaagatatgacacgcgagaccaggacttcttgtcagtctacgctcgtgtggttgatgggaaacagcggagggattgttttgatgctaaatcccacggatcacactggcgctagcccactttttctggcgaatcatagctggattagttaagcacttactgatgcctgaggtgtctacttgtacctgagctctcacatcgtagcctaagatattacctcggtgcatgaaactattatatcgtcaagtgaggcacaactccattacaacaggtcaaatttcatatatcgtatcacccaccatgctgtcgctcagtgtatcgagttatcacctctacttaaccactgaccgccctttctaccgtcttccccgccgccatatttgaccggcagaaacggtcgatctattgatcttgtagctgccttgtcgcctcaggcgggtagccgcctcttttgactttctgtcaaatctttaaacagaaccttggaatgtgtacagcttcataatatttctcgtactccgtagcatgtgtgatgtcttccacgagtgacagcgacccactacaatttaaccgataaattaagaataaagcgaatatacaatgagtccgagtatacgaataataactgtaataatggttcgatatatatagatgattgagtggtatactaaatatataattttgcaccagttcatatgcgtataacaaagaacaagaattcattctgccaatattccaggccctgatccaatttgtatccaagacggaaaacctcatatccaactcccataatcctagcaatgtataatgataatgacaatgacaatgaccaaacaaacccacaaagggaaagaagcagcgctgaaaagggggcatgcggtatataaacaaatgcaaatagatcactcctctaacaggtcgatcccgtctatgccatatccaaagtccataatgacagcccgggagtcctggctcgtcgcaacaatgcgtctataatcggactgtacgctcaacatccagcttgtagtccagccagggaagtcgatggacatattacccgtatcacggtcgaacaccttgacgctcatgtcatagctaccgctaatgatgcgcttattggcgctgtcgagatgcagagatcgaatgagacctgaatgcccgtgcagctcattgacgagctcgcccgtgttagcatcgaattgatagattatgcggtcgttgccgccagtgaggatggtccggccatcgtcactgaattcgacacacgcgaggccacggtctttgctggtgaactccttgacacattggcctgagatcacgttccacatcttggcaacaccgtcaccgctggctgacacgataaggtcaccgcggagctgcacagcattcactggtccttcgtgaccgttgagttgcctcaaaagcgcaccggtgtttcgatcccagacacagatggtagtatccttggagcatgatacgatgtaccggtcatcaaagcacacatcaagcacaccggcttgatgaccggaaagacgacgaattggtcggtagtcgtccttgacgtcatacatgatacaggtaaagtcagaagaccctgtgaccatgatctcttcgtcaaactgcaggcacaggattgatgcgctgtggtatatcgattctttctctaatggtgttgtaattgccgctatttcgtccggcgtgggccacggcggggtaatagtcataaagggggcctttcccgtggcctggaaagttggattgttcactggaccatcacggaaagttcgagccgctggtggcccaataatcttcttgcatgaccacggatagtgcgcgtcccatacacgaactgtccggtcacgggagccagtaatgattttgttcctataaacttgtcagcagtgcacggcatcaacataataacgttaacttactcgtcaaattgggaacaataaacgctgtcctcgtgaccttgaagataaatggctgcagccttgccatccttccagcgctgatcgagagcgcgccgaacaaggaacttcttcttccagtcctgattcgggattgacttccctaatccagatgacagcttcaccttggaggccgtctcacttaatggccgacggccatatgcattgcggaatacatgcctccaaacatgagaagaggatgcacgacaccaggcgcgggagacgagctctgcgtccatgagggaatcaggatccaaatatgaaaaaatgtgtgatgtaatctcagccggaagtagagccacgggatctgagaaaaaaaaagagaagttaacaaaacatgcgcgttgcccatcagagtgttcatccttaccgagtcgcgtcatggccagcaactcgctgtctgacgtatccgatcgatcgcccaagtcaatacaaataccgctctccgagtcctggggaactctcaaatcaagcattttgttctctaattccgcttttcgcgcagcctccatctgctcattttgagctgcggctgcggcacgcgccgctgcacctgcagacatgtgattcggcagaactggaggtgcctgcccacggcccgggatgggggcagggatagaggcagtgggtgcatagaaactgtgcagggcagacacactattcaaagaagggcgtctattgacgctatatccctggtgccaaagggtttttgttgaccggagatcccagctaccggaagccatgcgcttgtgattcgcatggttcgaactatggtggtagtaacggttttcatcgttatcaaccaatttagtgtcctcggtgggaggagttgtttgcttggaaggcttgcgaagactgacggacaggcgatggccgagagcgaccaaaccatccacaggatgcttcaaactcgaaaagctcttggcgccacggcgtcgcggagccacgttcgggaacgggtctatctcttccacgaccgatgtgtggtcatcctggcagatttccgtcaagcgtggctcatcccatgtgtccaaagtcatctcctttgacgtcgggatagcatgacctgcagtgcgtgggcgcgaacgaaacgacaacgaagagcgtcgctttgcggaggtggcgttggtctctcgtggcgacatgactgaggttgttggtgtgccgagggcgaattaaacaggaattggatgaatatgaacgcaatatatgacggcggatgttaagacaaagaatgtcgacgcttttgtctattttatcgggtatcgaccgatgtgatgcttggtcttggggggtttctgtgagataagtctaacaaagtatgtatatcaacgaccattcgcaaaactccaaggacccaagagaatgaaaaagagagattaatgaatgaactatacagagacaaacaataggaaaaaaagacgacgcaaggagaagataaaaagggcggaagaattccagaaagcagaacggatgggcctgggtcaggcggtgaatgaattagggagtgattggttcgaccaccgagttctcctaagagtcgctagtactgggattcaaagtatggttggctataaggattaagtaccgaataccttgagagtactcgcccctgcaaggctcagacttttttaggagtcgggaggcaaatcctggggggaaaacagccggacggaaaatgcggagtaactgtgacttggatcgccacgataaatctactgcggatccaagtaccgactacactctcacggtggcaattattaggctttcgaaggaaaatccgagacaatgatgatgacaggctctgataggccgatattggaagaacaattgacttcaatctattcagataaacacccctaaaccccctaacccccccagccctctacctcctcctggattttgtatgttgacaccgactatatacataattcttaatactaaacatcatatctcctttatccaaagatcttctcatatccggtcaaagtgaaccgatagtgaacatcacccttcttcatgcgcagcatggcctccttgagtccttcctctccaatggggatctcttccacccaacccttaagacccttatccgcagccagctgcaacatctcaagcatctcccgacggctacccaggtggctggcaccaatgagaacaccgttagagattaggttctgggccttaatgacctgaccctcctcctcaggaagaccaacactgatccagcgcccatgaacatccatcatagacagatagcgcgcaagatcgaagccctccgaggagttagcgcagttgataatcaaatcaaacgagtacaggtgatccttctcccatccctcctccgcagtagcaatgtaaccgtcagcaccgagcttgcgagcgtccgcttccttggcgcgagagcgcgaaatagcccacgtctccgcacccagcgccttggcaaacatgactccgaagtgaccgatgccacccaatccaacaattccaaccttcttgccaggcccagcaccgttgcgcaccaagggcgagtacgccgtcaaaccggcgcacagcatcggagccactttgttagtctccagtgcgtccgggatcgggaacacccagtgctcgtgtgtccgcacgtgcgatgagtatccgccctggctaacgacgccactgtcggcccacttcgaaccgtaggtgtccataggctcaacctggcagtatgtctcgttgtcgttgaggcactgcttgcacttgccgcaagagtaggactgcgcgccgactccaacgcgctcaccttccttaatcagagtgaccttgggtccgacacggattgcgcgaccgacgatttctaggatggttattagcacgagacagtagccctttttttgctttttgaatacgtaccgtgacccacgcacagggggaacttttgttcaccccatcctcctataggaatacattagtcggtatttctgcttggtattccaacgggattaccataccgctgatagtgtgcacatcacttccacatatgccacaggcctcaatcttaatgtcgacgtctatactcggttagaagcaagcataatggtaccgacagcctaactcaccatagtcgccgaaaggcttcagcttgaactattcagcgtaataaatccagataagcgtatatcctaaccagaacacagaaaagagcacatacgtagcgcttgtggaactgggtgaagctgttaggtccatcgacctggaagccctcagcttcttcggggtaaggcattgtgataagaatgagtgattggtctgaagaatagaacacggaccaaaaagtaagaaaagtaaaatagaaacaagaagacaagcggggtgagggggatgtatatctacaagcggggatcgcacaacgtgccctattcatcccacgcgggatatgctacgtattgttacaatctagctgcttctctccagtcggacaatgtcccgtggacccgctccgagaaaattgacaacggagaagattcagagtgatcggagcggaggactcggaggtggctgtcgcccgagaggccaacacgctaaacagaacggaggtggtccgggcagcgtggggtggttgttctatttagtggggtaagatccgctacgtagccgataacgttaataccaagtggtttttccacctatgagcatgccaggagaaattatatgccggtttggccttatcgataaggggtgatatagggctttggcttagggcttgggccttttacatgggtttggtctgtcaggggcaagtatgtagatctgcaagacttcttcatttggtaaagcctacattatagtttgcagaggggtgtggcactcaatcagccctagcaaagtcgacgtagacagagaatttccccaaataaagatcggatgccctcagatagccatataaatgagcctttcaaagctatactgggacagcggagctaaatgatggtttccatatagctataatttcgtgttcctagagctgagcgatactggtgcgataatggtcaagaggccacgcccaacgaagcagtgagtgcatcatatcgtagtacttcttcctgtcaatctgacccatgtaagaatccaaggtgaatgatttgacctcggtaaattctttaaaattcaagaccggggtaaattgaacctgaaatctaccatcaaagtaggcgtatagtacacgggcgcagcatctttggtcaaacactatgatcatggtctatatcgctcgcaatatatcagtatgaaattctttcggcacaaggcatggggttaggaaggacctgaacgtaccgggaaaacttcactgaatctatgaacaccctttgactcaagtgcgttgacgagcgattccaattcacggaacatgcctctcaaaccccagctaattaaggctatgagctcagcagccgaggggcgatcgtaaccgcacgaggttacatccaccagagcccatgcatgcgacttgtatgggtgatctatctccattgatcttgtgatattgattccgtgtattttgtctgggagatcgaggccgtatagtcttcggaacctggataaaattgatcagcctgaataatacaaatgtcacatcccccaatatcaatgtatcactcaccagtagactgaccagtcatctgtctcgtaattcgggatatccaagtcgaaagtattcgcaatcaccatctcatgatcattatctgcctccttctcgcttttatcgtgactttcatcacttggtttgcgattctcgtcaccgctctcttcactcttgtcgccatcttgctcactttcatcatattttttatggttcatactttccccttcttttgccttgtcactgtgtatttcctcgatatcgctttccttcctatgatccgattcgtcctttccatcgctcaccttgtcgcctccagtgctatcaaggtgccccgactcatgaacagtaggatcatcataattatcttcttcttcgcctccatccagctcgtatggccacaattccgggatgctgcagtcctgatagtccatgaaaacacgtcgaagtagatagtctgcacggtaagtccctttgccgtagttgcctttttgagatagaaaccagtcccagcttggatctgcacatatcttctctatcctaggtgtacctcttcgtggcatgaaataatgcgtaaccgaaggcgaagttatcccagaagcaatgtctagatgattgagatcaattcgcagaagctgtagattccgctgggggatggaggaggttgttactttcttcatggagacaagcatttgttcaagtctttcccatctcaggaaaaagcaccaaaattggggggttgtatttacaggggtatcgcccattttggtagtttgtccgaggcagagatgttgaacaataaggatatatggcaggatcatgaggagaaacctggtgctagtaattataataagtagattgtatgtttacctaggatcatatctagttggttgagaagaacaacttatataggattgtaagactgatttaatgtactaagccccaaccaaaagctcgtccgtttccttaaataccaggctgaactgtcccagtggacgtactccgccgtggaattaagagtaaagtatattttcatgaactatgccagtttgggaaatcagataaacttgaatgatgcagggctttgtaatgtcgaagcgcctcaggccacgataactatttgcctctacaatataagcaaccaacgttggaaaatatggcaacaaaagagatgtcatgaaacttgatatatgcattggaattattttactagactttagatgaagctccttgcgatttcccaagattatgccacatcgggcaagctcaattcaacatccatagcaggcttgatcttatcggcaacagcctggtactgggcatcagtaagacggctgagaggtcggcgagggaacccgccgtaaccgtagtatgactggatagcacccttggtaccaggaatagcagcctttgtgagaacccagtcggcagcactgagttgctgctgggcctcgatggcctctgtgagacggccctcggaccaaagagtgaagatgcggacacacaggcggggaaggacgttcgcgccaccggcaagaatggcagagccgccagagacgagggtctgcagactgaaatcggcgataccgccgaaggcaacgtatgggtgcttggcgtttggcttggagactgttgcggtacgctgggccggagtcaagggggagggaggggtgatggcaccgagagcggtagcgacacgagtcagcttgccggtattggcacaggtgaacttggtgccgacgatgttagggtgttcggagatacggatgatgaggtcggagtccatgtcaatgccagcgacggcaccggggtagttgtacaggataataggaacaggggagccgtcagcaacagctgtgaagtattcgtacagagtttcatcattgccgactgcggtgcggtagtagctaggaggcacgatcagaacgtactcgccgccagactccgcaacctccttgcacaggtcgatggttccgcggatgctgttctcgctggcgccggcgatgacgggcacgttggtgaaaccagcttcatcgagagcagaccgggtctcccgattgacggtcttgcgctcttcgcggctgagatgcacagcctcgccgtttgagcccatggtgaccaggccgactaggccagccttagctagacgaacagcgtgacggcggatagaggggatatcgagatcttcggtctgggcatcgaagaaggtcattgtcggcgcgtaaacgccggggcggagtggggtgggagacatgattctgagattattggattttggttgatgttgatgttgttgatattagagaaatgacctaactgatctacttgggacttgaggggtatatagcaatgaaaacatcattggccttcgggtcatacttctcttcccccacgtccggcaaatgccccgaggtacattgtatggtggagaatcaaattccaccaatcagcacaagcacacagaatgtgggggacaggaggggtaaaagcgacgggtaaagatggctaaagacgcacttcagccggcgttgaaaaggccattagtctagcgggtgataaatcgcttgagttcttgagtcgtacgtataatagtctatatgcgcatggaaatccctatgtcttgaaaggaaaaatgagcttgaaaagtgatcaactggcgtcaaagccatggtggatgacgatacggctattgaatttaccccagggctatttcaaatgccggaagaattatatccagcgatttaataccccggcttcctgtaaattagtttaaaatttcctcttccccttagaaattccccggaattcaatcaccatttcggaattaacagacatcatggctcctcctagcgttttgatggtacggacaatggttccccgcagtagatcctcaagctaactgagctcgcaggtcggtactggtgaatacaccaccggtttcgtcggcggtggtgcatctggctcagacaagaaggtcggtgtagtaggccttagtctatttgacctgcgtcggcggggtaaggtgggcgacttgagcatggtgggcgtgtcgggcaagaagttccctggtatccgtaagttgagcgaaagaacaagcaattaaacaggaagctaatcgcgagaataggtgaccacttgcaccgtaatatctctcaagtctacaacaacctcgatacctcgttcgcttcgttccccgcggacgaccagaccgaccccgacgcatacaagaccgccattgatgccctccccaaaggatccgccatcaccatcttcacccccgactctacccactatcctattgcgctgtacgcaattgagcgcggccaccatgtgctcatcaccaagccagcaacccagcggctagaagaccacctcgctctggtcgaggtcgcgcgcaagaatggcgtcttcgtcttcgttgagcaccacaagcgctttgaccctgcatactctgatgcgcgggctaaggcaaagactctgggtgacttcaactacttctatagttacatgagccagcctaagagccagctcgagacctttaaagcgtgggctggtcgtgattctgatatttcctactacctgaactctcaccacattgatatctgtgagagcatggttccagattacaagcctgtgcgggtctcagcaactgcatctcagggtaccgctgccgcgcttggatgtgtccccgagactgaggataccatcactctccttgtggagtggcgccgccgtgataacccggcgaagattgccactggtgtctatactgctagctggacggcacctcaaaatgcgggcgttcactcgaaccagtacttccactgtatgtgattctattttccggcagtaaacagacatcttctaacattggaacagatatggctgccaacggcgagatccgcattaaccaggccaagcgtggctatgaagtgaccagcgacgaccagggtctaattcattacaacccgtaagacccccattctcatggtaatgctgtaacatggttctatgctgactattatctagattctatatgcgctacgctcccgacgaagaaggaaacttcagtgggcagacgggatacggctacatcagcttcgagaaattcatcgatgccgtcacagctgtgaacgagggccgtgtgaccctcgaccaactggacgcccgcccgctgcccactctgcgtaatacaatcgccacaacggcaatcctcgatgcaggacgcaagtcactggatgagaggcggcctgtggagattgtctccgagggcgataagtgggaactgaagtaaagagtaaacacgatgtaaatggatttaaattataccaaccagtgtattattttggaatgaccgtatataatacatttagtgctgattctgtcatgcgcaatgtcttaccttgagtcgactaggccgcaactttaaaaatagtaagctgatggaatacgagtgcgactccaattcagccttgtacttttagaattatcatcccccctcggcgattttttgtatatatcagactaaatcattcagaatgatgcgccgaaaagaggtttataccaatatcacgcccatcccctcgtctgtgccccgccaactagccctcgacatcctacacagccatagcgaaatcatcacactaaatccactcgtcctctcacatcaacccatcagggctccacgcaatgccgtcgccgacgagtactactcgacgtggtacgagatcacagaacgagtgcaatacgtcccggggctgggcaagataggatcgggcaagatcagcttcaaaggctgtttccacaatgtcgcatggggtctacagacgcacatgtacgcgccgatgggaatcgacctccgaagcaaatggcgcattggaggcaaccagcgcgacgaaccaccggaaccgcaagacaagcgcgcagacggcgccccgcaaaccggactctatctgcgcgaggatatcgagatcgaatgcaaccgcacgctgatttctttcgtcaagggtcagttgaaggtcgcttcgaaggtgctggtagatcgcctgattaagaaagccgagcttcttgatgctggtgtcttgcaggctatgatggaggatggcaaattgacgacatataatccggccgaccgatcgagcagaattgggagggagctgtcgctttcgtcgcgaagacagtcagatcaaatgtcgaggtcctcgtcgtctcggggaccgcgatcgccgacggattcgcagttggggccgatgtctcctggatatgcctttccgccgcagtacggacaccagcacagtagaagctttgctgtggaattaccaggggattcttatcatccacaacctgcacctggtgcatatcaagagttgccggataccagtcgatatccgaaatcatcacggctggataaggggcataatgaactatctgttatggaagaggctccagagcgtgaagatgggttactttacagcccttacaaaccaaagggttagttggttttaattttttatgtcagaagcagacacaactgctatgcattatgtattctttaagcttaatacgaacacgtccattcttcaagttgtctactgtatatcccgacatcgttcgatgagatcctgaatcctaaactattaccttcatattatcctaccgatgcgtgacaataattctatcgttcggttccagtgagtttcgacgaactgcttcgggcatgatctgtgccaatgatgcttccaatgcttccaaatttatgaacatctgatttttgaaagagaaagctagaaatccaagaaacggcgctactccgcacacaaataagaaaaaaacaaaacaagacagctcgtggtatcatgcgagaagaatcattcaaatccaattaacggcgggatccacccttgataatgccatcttcacccttgtggagcttgatacggcactgggggcagtaccatttggccgtgcgagaggggacttcggtcaggcccacgcagctgagatggaaccattcacggtcacactgcaacgaatagaatatcagcattctgctagaacatatcataatagggatagcttacatcttggttctcacagcagatcatcgtcccaaaactaacatctccacagagacagtatcggggctcattggcatcgatctgttcgaggacgccgtcttcgtctacacggacatcctgggagtcgcggatgctgaggcgcttctttccgggcttggctttgcggcgtccgtagcttactgccgcgccgccgtcttgaccagtggaaatgggacctggtgccggacgcttgcgccggcgggcagggccgggaacacttggcgcatgtgacggctcgcggatgggtggtttgtgcgctggtgttgcgcttttgatacggcgatcgcgtccacttactgctattgcggtcgggacgctactgagagttcctccttcgattgaggcggcggctacagagcgccgcgatgagggccgggtcacgggtggtgtaggtgtggtgacaacttggacaagtgatgggttgggtccggagcctgcggggctggggagaggaggggagaacgtggcttcaagtgcgggggacgtgtgggtcttgattgggagggtgaggtcgctgttggtttcagcggctggaacggcccctctgctagatctgcgtcgagatggaccagtcctagaagaaagaacagcgacaggcgcaggcggtgcgaccggggcagcaacttgcgtcggttttggaggctcgggggcaacaagttctgttgcttcagggataacctcttcgcgtttcctcttccgtgatgatcgattcgcggctgggggagcttgggcggggcttggcaaaggtttgaccgagacaccaccttcaccttccatcaatgcttgttcacgggccaactgttcgcgttttaatttctttgcttcgtttaatttcattccgcgattgctcagcttcgtctcctccaaatctttggccgcctcgccacgccgcgtttcctcaatgttatcacagtcaatgaactctccgcccgtctcttctgccagggccttcgctgcacggtatgcttcccagcctcggttcgccagggccagctcacggtgaatcattacttcactcggctgccagacagcattctttttcatcttcttccgcagcctggtcatctcccattccgtcaatcgcagccatggcaggtcctcactgcccaatttcgcatcagctggtggtggtttcaacagcgcaagggcctgtgctgttgactgtgcggtacccaggctcgggcgacgtgctttttccttctttgggggtcgcgcgggcttgggagcagatttaatgagttcgccctccaagtccgattgctcggtactggcaagcggagaatctggatcaaaggccccatcggcacctagaagacgcttcctgtttttatctctccgattgcgattgttatccaaccgcagggtgatacgcgtcgtggcatccttgatggctttcttgcctccgcgcgcacgcttcgataaaggttcgggcaacggcgacggttcctctgtggcaggtttcggcagtgcttcgagtttctggcggatgcagcctaatcggtcgaagtggcgatctacaacatcgtagaggcgacaggcctcggcatatgccgattcacgcgcatttatggcacgatcgagctgagaggatatatctttgcgtagtgcaattgcgcccggtcgggtatccgaaggaaggtctggaagctggccgtagatatgagtgagctcgtgcaccgcttgcgccgagtcgagatatcggtcatcgagcccgcggatgagggttaaggagcggattaagtctgcggggaggtattcagtgtaatcaataaagtctgtgactgtggcctgcgcgtcagggtcgaaggggccgtctaggatgacccctccgctatcgtctgtgtcgtctgtcatgggcattttctagcacgatagtagttgatgttagaatgtgtcaaattaggcgcgttctgcgatgataagtgaggacatcgaggggtctagacgtcagataacagatggagctgaatgccttactgcacgaggtcctacaacagcggatgatagttattccaatgcagctcttggtcacgtgaatatatccatagcccagatataccgatttggagcccgcatgtaacgaatatgtactcggtttttaccatagagttagtgcttcacttatccaatatagtaataacgaaattgcccttactccgagctccattaataccttcttatataaaatcgatcatgtcaaagctgagtcagtcggttttgaccaattaaaatggcctatgaagccccacctctccgaatatcgacactttaatgatacctatactccgtactaagaggtctatatggaggatagacgagggaaaagccacggaagtcaagtagtattaaagctgtttcgggttgtacaattgtaaagctctatacatctatccaaattgtatatagatgggcacctcagtgtagaatgcgctacatgtacacatagtctgttctatatagtttactgtctttattgaaagctatctcatatctatactcagccttggtctctttaatcaagagttgattcaatttcatctgacttttcaaagtcagactaaagtgctaagtgtttgctaatgtaggtaggatattgattgccaatcactaggcagtatcacctgcatgtataatattgttataacgtgacggcctgttagagaaaagagagaaaagagagaaaagaaagagaagaaagagagcaaacagagagatatagtgatctctttatgtactttactatgagctacatcgttctttcccagttgaaatcgtccctatcgtcccttcccaatccgatcgttccttcctaattaacaattctgatcccaaaggctcgccgtgcgcatcctggcgcgtttgtttatattttatattttcttatcctacttcctcctctcctcttcaccctacactcctcaatcttgccaaagcttttatctcagtcttccaaaatggatgttcgcgagcgtctgaagatgcttctcgaaggagacacgggtctcaatgacttgaatacccacttgagccaggctgaagccgtccaacctgcccccagtgcggatggagctgatccaggtgttgggtttaccaaagctaagcaagatgtaagtcaatcttaccctgagggtggccaatttcctttgtcgtacattcgtacctatgtggttggagacataggtgggtcgagagacaggccgttgacccagatcaaccagcgtcatccccgtcgtactccgaagatgcacattgatatcccgggcttgaacaagcgcaaagacgagggtggcggcggtatttctgacttggattgcgacgaggagttggtcactgcaatcccggtgaccaagtcgttcactccggccaccacaatggctcgcttccctttcaggtatatccctcagaatgatgcccagagcgtcaatgagcggttctatgagggggatcaattctggaatcgaacttgggatctgtttgtgaaatctaaaatcagttagcaaagtatcttgtcgctaatcctcacctaggtatcatctgtctgtcccaatggctatttctcaaaccccatttcttttgattcccacttcccaagctcaagcactgctcgatgaaatcaattcggctctgaacctcaatttgactctcacgggcgttgacaaggatggcctcgtgattgacatcgacaatgagatgctcccgcagcctatgtaccttggccgaaccagcacccatgctcggaagaagaaattggagagtattgttccctcgcctctggagaactggggaccccacgcacatctggttgagccccccgttttcgaggattttgaaaagaaaatcaagcaatccatcgccacaaccaagatcaggaagagctgcaagcaggcggtccgggatgcccgaatcaagaagtggcaggagagcttgggtcgtgcgcaagcctactttgggctgcgccccccactgaagccaaatgatacacaaccgtcgtttgccaatggtcagatcagaccgatcgatgttctgaaacctgtcaattgggcctttcaagatgcccccattttcatctgtattgaccttgagtggatggaccgctatggctctctgactgaggttggaatttcgactctggacatgatggatttggaaggtgtcgtccctggtgattatggccatatgtgggtgaagaagattcgatcccgccatctgcgtgtgaaggagcaccggcactgggttaacgtgacttacattaccggatgtcctggtagatttggatttggggagagtgagatagttcccagcgctgaaattccgaaggttgtggacgctgcgttccagcccccatacatggtttccttggagggagaagatatcccccgacacaagaacgcgaagcgcaatgtgatcttggtcggactcgatctccacggtgatatcatacatctccagaaagcgggaagccaagtttttaccagtctgaacgaaccctcttcggtcatccgtgagaccatcgacgtggcagagctgtaccgtgctgatgctgaagagaaccaaaagcggggccttcgagcactgctgggatcactgaatatcttgagtttcgacctgcacaatgccggaaatgatgcccactacaccttgcacgctcttgtgcgattgatgcttagagtcgccggggagaagccgtgggcatacgagctcaacggtgagcgcaatgttgagagcaaggatgagcgcaaggatcagcaaggcgaccccgagtctgaacccaaggctgcagtgtaacgacaacattgatggagacccgttcaccgtcaactcacgaaagtgggagtgactgaggggctggagccatgaggtcaagtttgagaatctttaaacatacctcgtgggatgctcttgagaaggtgaatgggcgcagtgaattacaacagaatgcgtgagatcaaaaatgggtgaaaataaaaaaacaaaggggatgtatggctagttctagctttctatggtctgagctgaatgaaaatctccgctgattttatgtcaaagctttctcgtgctaagtagtccataccgtataaatgtactgtatactacgaaggtgtatagtataccgtaaaaagcaaatgatataactccgatgttatgtcctactgacgacacaccatgttcatcccactatcgccccatcccacacaatcttaatctccgatctccccctccaacaaacacaaacaccgaccatctcaaccaatatatatttccccccaaaatccagaaaatgaccagtcgaggcccctttaccgcttacctgctcggaagcaaccccaatgcactcaagcgcgcaacaacccaccgcttcctcgcctccgcaggccgcggcaccctccccaagtcgcaactaagccaatggctctcccaagaccgactctacgcgcaagcctacatccggtacatagggctcctcctctcaaagatccgcctcccaacccaggacccgaaatcaccgaccacacacaccccaaccccggaacaaagcgccataaccgtactcatcgacgcgctcgtcaacatccgcaccgagctagccttcttcgagaaaaccgccaacgactacaacctcgatctaacagccatctctgccgaagagggcggctgctcgctcacctcctgcggccaaggctcggacatcaccgtctcggccggcatctgctccatcggctctggaagctgtccggggatcacgggcggcgacgaggaaggcccgccagcggacggggagggaaatgcgggcggcgagcagagcggcgcgcccggacacggcctgtgtcagagccagggagagtgccagatgccgtctggtggggggctttgtgtgcccggaccgcagttcagtgagtatgggcgcgatatcgacccttctccttcgggcggggaggggtgtgggactcttttcttctgcgcgagtcgcaccactaggggttacattgatatgttcatgtcggcggggagtagtggggtttcgatcttggaggggatggcggtgttgtgggctacggaggtttgttatcttcggtcttggaggtttgcggcggagtgtatgcgggaggatcggaatacggattataagaaagatgcggatgggggtgcattgagggagaagtttattgggaattggtcgagtgctgagtttgaggagtttgttaatcggattggggacgtggttgatgagatggcggggcagattaagggggcggaggagttggagattatgcggggaaggtgtttggagtggtggaggcagattgtttggttggaggagaacttttggccaaatgctgctaaatgatgtagagttatctgatcaactctagatcgacttgaaatgtcactatctctagggttgtgcacatgctgtcgcggttgaaaaatattgtatgtagaatatcatacatctgacttgaatcccatgtgcacaaggctatctagaacgggatgacgagcaaaagcaaagacaaaaacaataacgccgtccacagaccgaggcaaaatcaaatcaaaactccgaaccggtctctgctctcaaaccaatgacaatgtcatcgagcagaccgtcaaaacacaagtataaaaatgacaaaatccaccaacaccattcgtaatgcgaaagcatgaagcatgaagcaagtagtaaaacacatggacacagtctggaaagtggacatgttgtacatcacagaataagacagtctgcaccaaccatcgtaggcaacatcacgtagcagccgcacgggcagcattgcctagttgtcgatggtatgagccgataggttcgaaacctctgaaaatagtattagtttctgcgtgccgaccgagtgtataaaagaaaacctacctagcaagatcaaaccccgatccattatcatcatcatcctcctcttctcgctcttcatttctcgcaagagacgtcccgttaggtcccatatcccccgaatctgactggagcgggggcagagtccgaccggagccaagtccattcgacgtcccgggtttactaggactaacgagattcggcggcgggggagagctactcgggaacccgccgataatgcggtcctcgacctcacccttcaggggactcatgtccggcggcggacgggcaggggtactcccgatatcagcgaacttccagaactgcgcgggcgagctcatgggcatgaacttcgacgggatctgcgcggtactggggggcggaagacggggctgttgccgttgcggggcgggagtaatcatcgaagagggctcttcgttgtagtaggatgaggagaggactggcggggacccggctacgttgtcggacatgccgtacgcgcgggccaggttgttgctgctattttgaacctgcgtggagatgctggagtggtgattgtgtgagcgcgacgggagcggcgagggttcatcgtagtcgcgtgggttcatatgtcgcagtgggtggtcggagccgagccctcgaccgagccgggaaccacgctctggtgtgtatgcttccaccggggctacgggaaacgagctgaagcccggggacgaaacgggtggcgactttctcgctgttgctgagaacgaggtgtcgattttgctaacgtgagtcccgcgtgctgatgacgggggctctttcgtcgccggcgaggacggggcagatgactgcgtgccgcccttgcgtgtttgcttcttccggtactcctcccgatactctactgcgatctgccacttcatacccttgcccggctcgtcggtccggcggggaaccttttggaacgccttgtttagcgagagattgtggcggatggagttttgccagccgctttgggagtgtcgatagaacgcgtatttatccataatccaattgtagatactgttcaacgtgagcttctcctcctcactcgagaaaatagcctgagcgattagagtcgcatagctgtacggcggcttcaggtccttggaggaatccttgctgtaatcgatttcctccgtgctctccatcatcatgcctcggttgtaaagcggggactgcttagccgtgcgctggccggcggtatcgggcgatcgcggtgggggcgtcacctggcgcttgttgaacttcggagcaggcgccaacgagggcccgccggacgaagatggtcgtgtagcctcgctgttctgggaatgctgaggatgggcatgctgcgaagcatcccaggcaaccgaagccggatccggctcctgtccgctcgcaatgcgctgcgcacgctcgataaagctgggctggatattggcctcgtcgccgggcgtgacaaacatcatttgtgtattggccacctcgatgatgtcgccacatgagagaatcgcatcggtgccgcgcttcacaattgcattgttcaagcgcacaccattccggccattgacccggatgtgccaggcaggggtttcctcgccatcataaaagatctcagcatgcagtctcgacacgaatttgctagggcccaagtcgacatgaacatctggcagcgcacgagccgctattgtgacggggctagactgttccacagcccgctgttcgcggtccggttcacggccgatattgacatgcagtgttttgacgtaatacgtccaattgcggccggcaatcttagcatacgcctggatgcgctgtgtattctcggtcttggtgttggagtggtcgcgcgagacgcgcagttcctcgcggggggtgttcagatatgaaatcactagatcgacgaggtcttgattggtagcgggttcgtgttcgcccgttgagtcctcggcttcgtcggcggactcatgtttgacgtttcgaggaggggaggtacggcggtcaacctgaggatcagaagaaatctagtcttagctcctgtttgcgcgaggatctatttggtctcaaactaaacgctccgttgttctaactcaccttgcgcttcttcgcggatggccggctgggtgatgagtccggagcctctgcgtcggaggtttcttgcagttgaatttccttgcggcgcgcgcggcggcggttcgtaagcggcattatgtatagacgttcactcttcctggtctctggtatgatataatagacaaccaaagccggagtattttttccctcccgttgcgtaggcaatcaagtccgagtcgaagtactccacaaacaagcgcggggcactagagaggaaatatgatgacaaggcagaggcgagaaaaggcaaaacacagtttaaataaaaacaaaagtcttccaaggttggaatcggatttcagcgcctccagaatcggaagaccgttcagaggtagaaccagagaacgaagaacgtcggagcatagatttgccaccacggaagaaagggaaaggaaaaaaggaaaaaaaaagaagcccagatagactgtaaacaagatcaagaggctggatatctttttttttacaaaaaactcccccaatcgaaaggttgatattgtgtggctggatgttattatcgataatccctaggccgatcgacacgcgcaatggcgtctgtttgggtgaccgccttgtcgcgtaacgtgtatgacacagcagaaaaggatagaaaggagaagggaatgaagggaatgaagagagagaatataggaaagacaagagaaggaaaacaaagtgtacaagtaagaaaagaaaccgaagtgcgattggggatgtgaccgtaaacagagtggtggagtttgtggtaataacggtgtatggatacagggaaagctgccggaaaggctgagatagaactgaaataccaataccagcacgtgctcagcgtgggattgggatgcttccgagtgcagaaagtggaacttcttcatatccagatgcagagatgttctatgttgatgttctatgatgcctacataaggatgcagttggtgtagatatcctgtttctttgtctttattgttcttactatgcacatatccatgtctaacacctgtcttaacagctaatttagatttccctccctcatacatacacgaattctcagatcaataaaaatgagatctgcccgtttgcgtcatcccccggatctggcttagcttggaatgttgatttgcctctttgggtttgacatgtcgatctaaggtcacatcgctttggatcttctcaccttgaaagggtctacaggaaagagtcaagacgcaagcaacactttacgtaaataaacactttaaacagttcaaagggtttcatggagcgctacctaatattcatacaaacaggaacgacgcacgatgaaagcaccggaagagtatcagaaagaaagcggaaaatttctccgtaagaaaaaattaaagccttcaaagaacaaagaagaccaggtagaaagggggtgtagagcggaaggcaataaacaaatgtcgtcacggcgtgaaacaagctacggccaataaaggcagaaagagcggaaagatttactgaggcatcttggcgtccccatcctcgtcctcatctacaccacgtaacatgggatagaagactctctcagctgcagggttggcgtgctcttcctggggcttctcagaagcggcacgtgcactggcagtctcaactccctccatggcatcgagtccgggcggagaagccgaagagttctgcgctccatattccgcagtaaggctaccggcctcgagcaattcagaaaccaagcgacggaggttctcaagcaggcggaccttttcgacccaggcaacgttgacatcgcgctcggcgacttcagtggccgcttgcgcagtacgtttgacatcctcctggtcgggatcagacgaggtacccgacagagcggggtcaatcaagctctccgagatgtgaatggccttgggagtgcgctcgccgtcatccttgacatcatgggagatatccatgcggtcctcggtggcagcacggtcggccggcctggcgcgttgcaaggtaccaccagtgtagcggcggcggtcgtcgtggtcatacgcgccgctcagggtagaaggcggtgcggcacctgaggcggtcgggtaaccggcggccatgctgtcggcgacggtggccgacggcaagcgggggtacatacccgggccgctctcgtgagggggcgacacgcggtgagcatggtgcatggagataggagagcggttggaggtgtatgactgtgcgctggaaggcggggtcaaagctggggtgccgaccgatggggagtgggccgaagcagccatgggggctgagctagttgcagtaacgtggcttggcgggagctgggtcgggggggagtgagtggcgcgatagttcatgccaccatgcacgtaatgcgcgccgggctgggcaatgccggcagccgccacattctcatcgctttcgtagatggtattctgcatttgttcgaggaattgatcgatgttgattaaatcgttcttagtccgaacattggacatggggggaaggtggtagcccggagcctgggaaccaccagggctgtaaccaccaccgccgccgaccgcaacagacgcaggcatttgctgatattcaggcacgggaccattgaggaagggaagctgaagggcctgcagacccaacagacgctggccgaccgcggcataggaattagggtcgaactggcggcgcttcaagtcgccaaaaaactcgttcaacgcatcgtatccacgcttacgatcataggggtggcctccctcttgtccttggctcagggcatagtacacattgccgtaggaatgcgggttgggggcctgaggtggggggtgtggctggtagtactgtgggggcggtgcgtgcgaatactgcccattgatgccgttgatagggctctcgaagtaatgtgtggcagcagcataacccttagggttctgagggaacatcatatccggatgcttcatgcccggttccggagagcggatctccgagtcgtcggcatgggtcttgacatgcttcttcagatcctgaggtcgcttgaaagccttaccacagaagtcacacttgtgaggcttgagcggcacgtgaacacggatgtgggacgtgatatgatcacgcttgactgtggtggtgttgcaagtaccccactgacaggtcaggttgagattgttggtgcttttacgtccaacatgtcgctcacaaacatgctcctatccgttattagcatctttttttttctggaattgattgatcccacttacatagagagactcagcattgggtgacttctcagtgcatccgacccactggcacggcagctgctcactggcggccgcagcagcggcggcgacggtcgctgagaccgaggcggaaggaggtgaagtggcctggatggccgcctggatggccgccggctcagtcaccggcgccggcacggctgcttgggtagaaggagaatggttctccgtcatgatgccaagaaattggattagttggcggaaatcctagaaagcaaatgagaagagaaaacagaaaaaggatccagcgactacgaggagaaagacccgatatgtatacaagaggaaagagaaaaggagagaaaacggggactccgcagaagaggaaaaggagccgagcctttgcccagaaaataccgcgttgctaagcctagcggaaagacaaggagagaaatgcgaagaccaagaccgggccaagagcctgtgcgggcctccagaaccgaggggcgttggcgccatggcttttgactggtggaccgagggggggacgaggggctgtgggtgagcattccagggctaacacgtaccaccgtagggtacagtacgggggggatggtacgtggggtacagtacggtatgtattttaataagatttgatctctggccgtctatcactggcctgtcctgtctagtaagcgaggctaaatcagttagtgcacttgctgcggagtactgaaattaaccagtgcacggcaatgttgcatagaaacatcacgttgccgagaaagaaacagagttgccggttcatattgccaagccaacgtccaagaatcatcctaataggcagtgcttcttggcagccaagtgattcctcttgccaataattcccgctccggagcaccaagactcaggtcttggactcttggagtcttggtatgaccatatccctttcgtattaactttgtctctggtgtgacgagtctgattaatctggctgcctggtgcccttgttacggccggcatgcatgagtcggtcggtttcggatttagatcaccacatctgaaggtattgccatgtaaccatatgttctggcttctatattgtctatttcctatatattctatacttctctagtctagttttctattctattctatccgtaacattggacctgacatgtcagaccccaactatacaactcaccaggatcaatcatcccgaggtcttcacaagggcctagcccaagcattccaatcctccttggagcatggcttggccattggcttggccagccgaacccgaggcaaccacgtggacgtctgagctccgcacaagtaccacaagtgccaccttactttcccgagcggtacctccgctttggctgataccaactccaaacgttcaacccaaccttcgtcccctttgtcacagggaacgcagcgtgccaagtctcagggtaccctgttccatccgaccgaaggttctcccaaaacaccgcattacccttgataggcttgaatgtgatccccatgtcattccccttctcatcccgctgctcacactccaaaaactgacaccacttctccccagccggcatcctcaaccgcgggaaattcgtccccccaccttcacagtccgcgtcgatatacaccataaacgtgctgaagcggtcccccccgcgcgccaacgacccggcccagtcatagtggtgacggtagtgcccggaggcattgtagcgctgcgcccacatgcgctcgatgtataaatccgggtgccagccctggaagcggcgggcgcggtcttccaggcagcggactgtgtcgtcgcggtcgaggagggcacggtcggagaggcgtttggtcgggtctacctgttctgttttgccgtcgtagacaattgaaggggtgtatttgttcacactgggattcaggggagggttacccggttagcttggttatattgtgtgttttgtgtgggtatccgtgttctcggggatttggttgcggttgagattggtgagttacctcatgtccaggatatggtttgcttcggtttcggagatgaagttctcgatgtatatgatcagcggttcgcgtgaaaggagatgcacgcggtactcctcggcgctggcgcagcggaatggcacgccatcttcggggctgatgaagctgtcgtcggtcaggttgatgcccggtcctggtgcgctggactcatcgaagagctcgtcgctgtcgctgggtggtgccactaggctcgggaagaatccgcgcactaccgggtccaggatgaagatatacaaggggacgaagtagagggcccaggtcaagacggtggaaagctttggaagtgaccccattgggttggctataaatagtcccggcaatatgtatgttgtaagccaagtaaatgtacaggaggtttggactgttagctctccatgcgaccggggtggagggttgcatatgccaattgatctgtctttgtacaaagatgaaggcccaagggcaatggaagaagaatatgatcaagaaagagtgttgtattgcaaggccatcttgcgaaggaaagggtttggacgttgaggtggaaatgtcgaagtatgtgggtctaggctaggctctagcccgaagttaacgatgagcaggcttcattggaaaaatagctacatatgtaggtatacggggttagggcgatcaggagtgaagtctggtgtcaggtagcctattccgtaggctgatttaggaaaagagctgtacggagtatatctggatatgtggccaagagattgagcctacaactgtcgaaatgcttatctggttcgtcattacccagataggcctagtcaaatgtgatattctatatcgccggaaatcgctacatagtccttcagagctgccgaaaaaagagtgaccaaatccgctatgtgtggagaatgtatccattagatccattatgacatacgtaggccatcatagctagttatctcagatagttttaggccacatacaccagatatgacgtcccgacgataccctcgccaacaatatacaacaggctcacgacactagaagttaaatattgcatactctcttctattgcctaaaatgatagtattttcccgattaagcgaagatctacatgattttagagtccagatctccagggaccaaggatccgagcaggggtaagtggcaaatgcatccaaagaccgaagagggccaagtcaaagtgcatggtagttctgaataccactgcaaattgaggccaattggacagcacttgagcattagcaagacctcgggaagaggatgtctagtgtctagtaaacacagacccagagatggtaggtatgtatataaacgggcaaggtggcaagaactagggatagaagttaggggaagtctcagactctgattgcctatcatattcctacctagtaaatttagtatacggttaccaatagaatgtctaataaatataaggcccagatatctcggccaaaaggagaaagtaaaacattccattcctccgtaaatattcaatcttcatcatgcattagaacttccgaccttcttggcttcggagtcattgatgattgaacaattcatgttcgagttacctatgtacttaactgtaactacgaaatacactgtcgatagaatcaaacagggctagctaccaggtataagacaccgcaatggagcccaacgagtcttatggcgcgctcgactatcgccgtcagggtcggagtcattgcagcacctggatctcaaaagcaaggtaatactagcagacatccatggccaaggccgtaaaatgtgaccgctcgaatttccctcagtcttggcccggacctatctaacagcgaggtcggcaattatcgccggcgacgggttgaatccccacatattgcccctgagaagtagaagttagcgtcgtgattttctgtcgatgaataaggagtagaatgtttgctcgggtgagccttactggttctacgctggtcccgaactgagctgctcagcgtagagggatggagcgtgattgaaacattgggataactttccatgcggatttcagggtctcaaaagacatgttgacacgaagtcagctttacaacacgtgcagcctgtaggctcgcaagtattgaaaggggaaaactgagatttgagggctggttggggaaggaacgtcgtcggataagggttgatccagtacttgatgcaactataccaaagcacatagaatgttcacttatctcgctcttactcccattgaatcaataatggaccaaacaagacacatcagggggtatagaaatccggtatacatttataattgcaaaagaaaagcgagactcctaaccccaaccaaatatcaacagttgttacaccaagattttgggcatcataatagcatatcctcgtaaaaggcacagcaaacgaatatggcaaaccagaccaaggttaaatgctgttagcattcatccactgagcccaatcctcagcagacgccccgctgcccggccgataggcagcattattgccaaacagatcatcaaaggttatccctagatccatattcatgcctatattctcatcgatgcccatgctgaaaggaggcaatccatttggagcgggcatctcttgctgttggggtgcggtttcaggtgccatgtcagttgcgatgttggcctggaaattgtagccctgccagacgaaattctggttcgggattgagaccaggtctgaactgctgctcgcatctgtcggagtctggctctgcgatattggggagtggacgcgggacgaagttcgggagtgggaggggcggaggtggcttggcactgatgacttcatccctgcggaatttgtgatggggtagttcggtatgtttttaaagtcaaaggtgggagtgccccctgcgctggagggatccactggtgtggtgggccccatgcctggggctgaatcgaaggaatactgtgacggcatacctgcagggtcgtgccggaagtgagcatcttccaaggtggacatgggctgtgttggatacgcgaatggatcgtccgatgggaacatcattggcatgagatctgggaggttggatggattggtgaattgctgagcccatgctagacttgatggctcttgattgggcatggaggaggtcatgctggaggaagaaatatgttccggggttgtcatggtttctgttagtaggtcaggcgtggttgaaatccatgtggactggtgatgaatatcagccgcagggcgattggtcacaggctggacattgtccacacttcgttgccggcgattctgatcatcggcgacagccggctgtgacatcatttgcactggaaaagtgcttgaccgaactggaagcgtcttctcgaaggatggcttcggctgaggttcggcattgttcggctcaggctcggcggtgttggatggggcggggcgcttgagattgacaggggtctttgagctctggcgatttttcaacatctcgggcaatgttttgaacaggcactgcattgtaattagtcaaggacattccaaattagatagaagaacttacgtttaagctctgagagcaccggtcggcagcaagactcttcttggccaatccggctagagtatttttgccctccatggcatctttcaggacgccatctttggctgtgggcgaatccgggttctcaagcacgaagaagatcaaagagaggatagcgaaataggtcgtatacatggtaaaccagaaggatccattgagcagtcctctcttttgcattccggtcgtgatgtgaacaatatttcgggaaacgctgacgcaggctgccgcgcaggcatatgatcgcttgtctacgccacgcgcttgcgaaccgccggtgacgtagtggaggaatgggcggtacatgaccatctggacgtgggcgtagcttatacgcagcaattgccggacactagttatgttagctaaattagttccgagcaccactgtagactggacttaccgttctagctggggcgacacttctgtgcccggtcgcagagcagggggtaattcctccatccaattttgcagatctcgttcgatctcccggattttggagtggctgaccatgtatcgctggtctgacttcgagcgatagcgagcattcttgactgggtagatatatttcaccacctttaagatgatgttggaaagacgagtgtgtgcattgcatccagccatcaacggtgtatagttagacgggggttgagtaattccttcggaagtgatgaaatcaccatcaacttccattgggtactcttgatcgatatcgtcgtcactcaggatctggggaagacccaataatgtgctcacgtagatgtccatcttccgaacgacccagaagatgcgctttcgaagctctcgttcgaggggattgaagtctgccgcaacagagcgatggagacctaatcgcagtgctgaacgaagtgcaattcccacatatgaatagcatgtgctcagcttcgcggatgattggaggaagagaaccataaagcagattgcttgtagagaaaccaagtcacggcagtcagtgatctccagtagttgtcgaccggccttgaagaattggaacctgtcaaagaaattaggcggtgccaaaatcaatacagattaaccatgacttacccttggcctattgcgccttcgtagccagccaaatccaaggtaccctgtcctgattcatcgtccgagaacaagcagccaacggcaatggcaatatataaaagcggcaagaaggagtgatcttggtttgtgaattgttccgggggagtatcgtaaatgcgctccagacttgcaaaaaaagagggtatatgcacaaatttcatcaaggagcaggcatgatcgatcgcattgtggcacaaacggcgcgcagccgcccgcggcggcaggtcatgtgtgggaggtaatgttgaatcttgaggcgactcggacacagacttcggactatccatcatatgcgcacttatcgaggggcgcgatcgagccataggcgctgtaatatccgcggcgcccagctgtttgcgcaaccggcgaacaaagagaacgcccgaggtgtgaccgtgataatcccaatggccttggtcatctcgatctaagcagcccgaattatcgaccatggtttcgagtagtccctcgtctgcgccttcttgcgccgggtcaagcgcgcctgacggtctgacatcttccgtcgcttttgatttttgcgcggctgtgaatttctgttctgtcgcatgcaggtctagttgtggatcatcgaggtcgacatttggaagaacgattcggagtagcgcttcggctttttgaaggcgattttccagggcctcgacatattgcggggcgggattccgacgacggttggaaggctggtcatatgagcaatctagaaagatttgttagggcaaatggaaaaatttcgagatataaacatatggggcgcataccataactataaacagtgcaatgagtacacggctgtttgccatcgcacttgattttcttcctgcgacactcgtcgcatgcgcggccaacgcgccgtctcttctgcgccggcagtgatttggagtccatgatggtggcatcaggggtaggagtatcgtggtgatcgtcatcatgcgaatacttcaagtcggtcatgggcgcgggatcctcctcattctcgccagaaagagggctcgtcgtagtcgccatgactggatatctgaggtgcgtagaatgcacggagtcatgtaaagatgaatatggatcttggcgggcaattcaaagtgaatactatcactatatgaccaaatatcactagggcatggacggccctatattgacagttgtaagataagtagagtcacgaacgaagactgaaaattcctatgccaagtccgacaatgtcgatcgaagtctcggtggtgaaaaaaaaaagttcgctagaatttggagtagttgaagggtctgagggggactagggtcttgagggggggaaatggagatcgacgatgatgaaatgattattcccgagggcggtgtgaggaaagattatatatcccaagagtccaggatatcccaatgtatatatcttggagaaaaagaacggccaagttcccgaggtcaaaattcaagcgagttgacactatagtttagtcattcagagtcgcacgccttatgactggttggtggatatcggcggttcatatgggcgacaccgatcaaataaagttccgccgtcattttccttttttccagaattttcgctcttttccctttaatttgaggcattttcggccttttcaatgtataacaggccgaatctcccaggtcttagcccggctccactgccccattcgtctagcccccggtcaattcgccgacttccatgtatgtgttgtatatgggattgcaaagcgaacggcagcgtttgaattattaataggcgtgctggggctagttcactcatgactacctcgtatcagcctcagatgagcctgtttgagtaagatattaccggttctggcatatatcatccatcgacggagtatcccggcacagaaaagggtgatcgtctgggaactaataatacttccaaggttcctcatttctatttgtgtgattcgactatcgcgacaatagtacggagccctccgtttctattcttgttccctgcgtaacaggaattgccgttgcaaggtacaaagtacacgcctggacccttgaacgcccttgcgctgccatcacgaagggatctgccatgcaaaggggtccgttgaaacaaggcaatatgcggcaaatagcttcgacagtcctggaacgcgaaacagggggaatgcgaacctcgaaatgacctataaacgacaatctattttgaggcctccgaagttcgggtttccgataagcctcatcatagtgctccacacggagtatataacattgttcgccaagtcacctgcgtcataatcgttcagaattatcaattagcctattattaactatccacttccttttagccatcgatcctggcgatccctcgcatcgggcatggcattccatttgaaattagcccctgtggcacgtcccactttccccaaggtggatcggcatgtataacaacgccaacgcgactttctcgcgacgttcgctgcctcggccttatatggctcgtctcgtcctatgccgatttccacaggctatgggacaacgcgatacatactatgactttctacctcgtcaccttctgctgcgccttcgccgcgctgggatcattcctgttcggctatgattcgggcgtgatctcttctagtatcgagcaggaggcctttctgcgccggttcgggtctcctgctttgtctgatgccgtcgccgggggcattatttcctcgtataccggtgagacttcatcttcgttgcatcttgccgcgacccggatctaatcttagtgatcaggaggcgcaatcgtgggctcgatgctcgcgtcatatgtctcggactactatggccgccgaatggtcctcttcatcggtggtctgcttgccactctgggtgctggcctccagggaggcgcagttagtatcgccatgcttatcgccggtcgatgcatcgcgggtctggcaattgggcagatgtctgccattatccccgtttattgtgtaggttgatacacggcccagctgctaagcctcgtctgacgtgagcacagagcgaggttgccccgccacagattcgggggatgctggctagtatgcaacaatggatgcttggcttagggttcctggttgctgtgagtaatcgccgggattttgctacctagatacgatccagctgacagggtttcaagcgatgggtgggatacgggtgtactctccgaggtggagccttctcctggcgttttccactctcctttccagtcataccagcaataattctcatctgtggcatctggttccttcccgaatcgccaagatggctcatcgaaaagggtagagagggggaaggtcgctcagtcctcgcccgactccacctcaaccgaaacgcaaccaacaaccagctactcgaacacgagctcttccaaatccaagagagcctagcatccgagaagcacttcgccgtaaggtcctggcgccaccttctcctctccccacggtggcaatgccgaatcctcctagcctgcggcttgcaagtattcacccagtgctcaggcacaaacgtaatctcaaactacagcccgcgcctcttccaaacgctcggcctcacaaaatcaacatccctaatggtaatcggactctggagcgcgctggcgcagctctggaacacgctcttcatgctattcgtcgacaaagtcgggcgccggaaaatgctcatcccatcccttttcggcatgggcgcagccctatgcatcgaagccacactcgcgctgtacatcgatttcaacgaccccaacgccaacccacatgccctgcgcgctgccatcgccatgttcttcgtcttctcgttcttcttcacggctctaggcatgatctcctggatctaccagtccgaggtcttccccacgcctatccgcgcgcgcggctcgtcgatggcgaccgctgcgaactggagtgttagtcttgtcttcgcgcggtgctcgcctatcgcactgacgaatatcgggtctaattatttctactgctttgtcgcgtttaattgggcggcgatggtacttgtttgggccttttatccggagactgcgggttgttctcttgaggaggtcgaggatgttttcacggcaaagtttgctgaggagcagtcggagcgctcttttgttgacaagaagactccggtggctattacgccgcgctcgcagattcggcgccaaggactgcatccgctgtcgatgaatcctacttatgagcatcctacttatgacactgctagtatcggtagcagtcacagtgggtctgggaatgatattgaaactaaggtttagattgtacgatgtaagatttatgatatgaattgatgaaatgaagtattcacgaagagaacatcttgtgttttcgatgtgatttccttggaaaataaaatcgcgctactccgtctacttcgcaataagattagaaaaggaagatttcaaggttccaccaaattgcctctttgggaataccaagacctacgtccgaaataggcaactagatccaccagcattttcagcagcttgaatgcattattgatagcaaaaattgtctcaattaagaccaaaatgactatcacaatggataaagtcaatcaccaactaggtgtagtgtttcgtctgtgagggctttgctttgatgagtttgggacttcggttcgagtgtggggtggatttggtgctgacgatcgatgcgtgtagggtcaagtcgaatgattgcactcttttgcccagaacttggatgtgctggactttgatggggggattgaggctatggatctggggtttaatggggtaggtataggatggaagatagaatagcatagggctatcggctgctttggttccatagatccgaatgttgacgcgtcagcttatgagaagagcatatgggttcaagttgcatgggcaaagcgcgtgtggaaattcagtattcaatagtctatacagtataccacttctacctctatgtggccgtctattttttgtgagtcaaatcagaccgtctaaatcacaactagcgagcagcaaatactttaacagcaagttatacaaaccccaataaaacatgtggtaaatggccaatattgcttaaataggctcgtcacgaggctcaacaaggatctcgttgacggagacatgctcaggttgcgtcagggcgtaaacaatggagttggcaacatccgaaggatcgaggatcttggctccggatggctctccgaatttcttgacggcttcagcgtccgtcgacatgcccagtaggtcagtggaggtgttgccgggctggatactcgtcacgcgcaagccagcgcctgcagtctcgaggcggagggcttggagggtggcctcgacgaagaacttgctagccgagtacacacctagaccagggaagacctttcgtccggcatcggaggagatggcgacaatatggccgcggccgcgcgagagcatgctaggcactgttgacgaaagagcgtgcaaaaggcccttgcagttgacgtcgactgtgcgctcccactcgtccgtctgcgtgtttgccatcatggtgaagtacatgacaccagcgcatgcaaccaagatatccactggtccgagctcctcacttgctgcttgaacgagagcttccacctgagtcttgcttgtgacgtcggttgatcggaggatacacttcacgccgtggacttcgaccttgcgcttggtgctctcaagagcatccaggcgtcgagcgccaagtgctacagcacaaccctgcttggctagggcggctgctaccgccgcaccgatgcctgaagaagcaccagtcaccacggcgacttgaccgctgagtggccccttcactgaaaccccgttgggtcggttgagggcattctgacgagatgggggccggggtagccatcctcgagcaaaccagtgccgagtgtaggtctccagcaacaggctgtccaccttgggacgctcgataacggcccggaaaggcctggtcaaagcgttatcaaggaccacgatatcccggaggaactcgacagtcggcatgccactgcgaagaatatcgacggtaaacgaaccatcaccacccttggccgagcctctcttctcgaaccataaggccacccattgatcccatgggagaggtttcgtctcataaccaagctctttaaggtcctcaaagaccgaccgagtatcgaccggcgtagggtctccgagatggaacactgtttggtctgcctgggtcagagtggcaaggtgcacaatggatttgctgacaaagttcacaggggtcatctcggcacgccatccgtccacctctggggcgtatccaagctggatggattccacaatcaatgcagtgagcaaatcccacgcattagcggagcctgtgacactgtgaccactgatggtaccgcaccggtgaattttgactggcaatccacgctcaccagccttgagaacgagctgctctgcaacccactttgtctggccatagccatcgagtaactttttggggacatcttctatatctagtatagtagtctcgggccagcctttctcgccagatgggggcaagacaccattggtagagatatactgcacggtcgcgccacccttagcggcgagacgcagaatctctctggttccacccacgttcgctccccgaagtgcagcgtaggggtaaacaaggttgacagtggctgcagcatgaacaattacttggacacgagccgcgatgttgtcaaattcctccggactcaggcccagtcgaggccgagaaaggtttcctggtaagatttcgagacgctccaggatagaatcgcgccagagtcccatatctaggaggttcctgcggattcgggccacacctccggcttgatcatcctgctcggggtcgctgaaacgcacaagacagatgattttagcagaggtgttctcaatcagatcattgagcaagaaagcgcccaggaaaccagtcacaccagtcagaagcaccgtctcagccgagctgattgaagtgaacgcagtattcgtgggcttaatgtcctcgtccagtgtggaatcggaaagcaagacagcgggcagatttgcttgcacttcttcagtgtggccatctctgacagcacgcacagtctccaagtggccggaaagagtagtgttctccgcaagacgaggaataggaacacggaagccgaaacgtctggaaagcttggatgacagatcagccagagacaaggaatgtccacccagatcaaagaaattatcttcggccttaatcaggctctttgagactttcagaacagcctcccagattgccgcaatgtcatggagaccgatcgggtcttttcctgtgcttttctcgctgccattaggactagagctacgaggcgaagggagatttttcatatcaaccttgccagagacctcgttagtaggcaactggtctagtgcaacccagagagctgggatcatgtattgggcaagacggttctcgaggacacgacgcgagctgggggagtggccggactcgttgatcacgaccgaagggcgatcggaggaagcctccttatcggcaacaacatatgcgaccagttgtcgttccagtccatcgccgtacgcagtgacaacgcactgactaacagccaagtattggcagatgtcactttcgacctttgccggcacaaccgaatatccgcgcagcttgatcattgcgccgacgcggccggtgatctcgaggaatccggaaggcagcttgcgggctagatcgcccgttctgtacatacgagcaccgggtgtggaatcaaaggtgtctggaaggaaagcctttgcagtggtctcgggaaggttaatgtactcgcgggccaacaaaggacctccaatgaagagttctcccgatgtgcccgtctccacctcctgtccatcctcgtttagaacgtaggtgtgtgcaggaacaatcgatgggccgactgggcagtaaatggagtcgccatcaaccatctcacggatatctccgcaggcaatctcatgcgtttcacacgcactgtagcagttaagcaggcgggcattgggaataattttgatggccttgcgggcaagatcggttgtcaccacctcaccgttcagccagatgatgcgtaaatcaggcacacgagtaccgaaccggggatagcgtgaaagaacggtagctaggagtgtgggtgtcatgagggtttcagtgaccttcttagccgagagcaggtcaaccagagctgcggggtcatagctcgtttcatcgggcacgataaccacggtagctccgcgcagtagcggccgcagcatctcccagatgaagaagacattgcaggccactcgatcgcccggttgtacatcctgcactgcaaatctcaaatcgtatgatagtaccggggcgcggtgtggattggcgattcctttcggcttgcctgttgtgcctgacgaataggacacaaacgccaaacggtccaaatcgtcatctgcgggcaacggagaaggttccttggcgtgtccattgatctcggcaatgggtccatccaaggcaattacggggacgggcgccttgattttgtcggtctcagatttgtgggtgataatcacggcggggttagcgtcctcgataacatccgccaagaggtccgcggggtaagccaattcgagaacaaggaacgcaccacccgcacggagcgctgccagacaggcaatcacgtaatgtgcgctgcgaggtaggagcacacccacgagggtgtcccggctcactccataggtccgtaagcgactggcaagagcctcaacctcttcatccagctgggtatatgtatatgtcgtggtctcgtcttccagagcgatggaatctggggttgcctgtacctgtcgcttaaatagtgtgggcaaatccttagtgatatcgaggatggccattgtttcggaaaaggggtatacaggacaaaataaggaactaaaaaagatatgattgtaaagttgtggtcatagggaatgtcgatgtacgtcgatggtaaagagaagaacgaggaaagacgaaattttgttgagattccaagagcttcgagcaatggaacctattaaccttccagggccgtattcgcgtggggttctccgggaacgggcttcttatcgtgactccgataccgtctacttccatgtcaaccatttaggtcttcttctaattagaatattgaatatcccgttaattctgctatagtcctctttctacattcctcttcatgtaagttatatgatgtcaagcctcaacaaatatgaagaaatcacatgtgacttccaaggttggccccacttaagccatttgcatgtgaaagggcgcttttcccaacactttggttggaggcgtaataaccttggaaccttggaaccttcgaaggcgccatgggcaattggaagaatcttttttatttttagcgttggcccaaggaaattaagaaaccgccgactaaataggcgtgaacatctacagattcaggcatcaaacgcacagaccacttcaagcagatctgtactaatgcagacccttgtcaaagtatcagtctcatcttcaggcgcaaaggaaaaagctcaattgccgctgtccgatacttgaagagctctcgacaaaatacattaacagaaccgttgacttacagatatctcaatagccaaaaaaagttcacattcattgtcgctaaaaagattaaaccacgtatccacctgggcacgtgcccacttgcctacctaggaatagtggcacggccgaatggagcttcccgagattcatctggaaccaatcctgcgatattcatacataagtcatgttcatccatagatgtctagctgttgcaaaataaaacgttgcactattaatgcgtattctgatgctacgtcatctatgcagcaattgatcttgtccacggtttccattggcttgcgcatctcacgcagaatgggtgatggggtgcatgctatacttcgagggataccatggggcgaatagtgctcacgaccatcatttatgattaacacatatcctttagccctgtcacttcacaatcatctaattccatcgatagttcacggtatattataagggatagcaagggtatatacaagacaagaaaccgtgaaagagtgatacaagagggtagaaaacataaacataaacataaacatgaaaacataaaaaaaacacaagtcatctggtccaggccagtgctatacattactcaatgaatgagtgcatcgaggatcccacgacgaagacccgcgtcccagagtcgataagtacccagagaagtccgagagctcctctactgaggcagcaggagcaaagccggcggcactggtgggccgtcactgcgttcaagcagggcttggagaatggcgtcaaatgcagccattcatctcgacttcgctgtcatccacggatttctcgagcgagcaagattgctacacgcgctagggtattgcagtactcttactaatcccacatcgcggtagttgttgagtgtcattaacgctgtgaaatgggcgaccgtttgtgtttggtcatctaatgtgttgcatcgggcgcttggggtgccgcgaggatttgatggaggatggatgtttcttggactgccctgtgtcggatcatgtccaatgattgggggttgtcacatcaatatacggcaagctgctcacaggatcggagaaagtcgaataattcttcatactggatctcatccgctgggatcgcttctgagtaaggtgggaatgttggttgaggttcggggctgacttctgagaagcccgaggaggtggaatatagcggagatagcattgagcgggggcttagagtgggctggggtgctggtggtaaagtctcagatgaggctggcgcatgttggtcataatcatagaaggtctcatctcccggcaagatatagttctgccagttggtcatctcgcgtgcgtctcgcatgtgcacctggcttatttccttgtggcctagtcggggatcagaatcctccaaggctgcggtattcagacaggaaatgattgcatcatcggagatttcgtgagggttgtcggagcggtgctcctggagcaaggagacagcaggatcgctatgaacaagggaattttgagtttcgtcttcatcacgaagaattagctgcatatactagaaagggtaatttggaatgcaacagtacctttgattatcccaggcacaaaagtcggtgtataacagtcgttggccatgggtgactggtaatgggtttcataggaggaggctggcatatcgtccacataggagtcaaatattccgtgtgcatctcgctccaactctataggaagagtattgaatgtgtcgaattgcgcatcgctgatcatagtagttggcgatggcacgaactgatatgggagcatggagggtggtggccatgagaaattgttgagatgtagatcatagctcggacaactttgtggatttacatcaataaagtcgtctagtagaagaggaacatcgtgagattggacagaagatgaccgtggaggaaaccgaggcatatcattagattcaatcaacggaggatccgatgagatagaatccaaaacaaacatatcgcagttagcctcaccattgagatcttctctgcgtgtagcttgctggatcctggttgatctcctcactcggggttcgttgttcttgttgtcaccgtctgaattcgctttcttctctgaccttcgttgtgcaccccgagtcttcctgcgctccccacgttttgcttgtggtgcctcttcttcactttcactttggcgagtgccgcctttcttctggcgcatatattcttgcataacgtgacgcttcacttgggttaagttggttcgcctattcttcgaagagtcgatgaattgccaccgcccattgctggcagccttatcaagaaaggttgacatctttctggcagaagaaacgtatatgagccgtgcgtctccttgtggggcaagggagggatagcatggagaggtttgaggatataatcgctggggcgagtctaatgtccgcccttaaaagaaagagatccaagaatagaacaccgaaggaagaatggggcaactctgcaaatattgatctaacgtaaaaagaaatatacaaacgcacgatcaggataactagatacagagcattaatcgggatatgcttctccactcatcgtctttagactagactagaacggtcttccagcacattggccaacaagtgtggagatcagcattacagcgggccagggcgcaaatagccgtgtatgagctatgcacctcttggtagcttgggggtcaaagtactagaattgggaccccaactggggcgtcagggtcgataagatcccctgaaaaagctgtgacaaaaccaactttccatgttgtctcctccatattaggcaaagcttgatctaccaggtccatatttcacagcaagtaaactggctccactacccccatatgtcgaatcatcaattctgtgtgtccgggtgtctacccggcattctacccgatctgcagtctaattcccgtaagttgcctgtgagttacagattgaaggtgatcatatagttccctcgcttagagcataatcacagctgtttcgtaccttgcaatattttgtaattgtatcttgcacggcgtgatgtgtcagaacctttcttcggcggaagcattgcatgacgtttctagctgtttctaattcgttgcggtagaacctgcagagttatgcacatgaatggatatagaggacctcgttggccacgaaattaaattgcttttgtggggttaaatgggagatctctgcagaaggaaagttcggaaacttttacaatctcaacggtatctgaacctgctgatcatctcgtctatattgcattatcgaattggctatggatactagatttgccgttgcggtgatacaaagcaatcataagatcgtagaatacccatataatgactctttgtagagatacaacaagcccttctgttgactctaccccagtggagtatataaaagttggattgacgtagtacgccacaaaccacaggttctacagaatagaatgctctaaatatcgttgcagaccgaacctttgagatttaaactatgagactatccgagctctccgcccccacgttttacgcttgcgacatgccctcttgggtatccttttagtcgatcaccgaccaccggaaccaattgctatattccgaatatccgttctccaaaaaaacaattaagatacgccaatcccatgccatgggcggtaataatctataaaacactgatgggttatcaggactggttgcatatgtgggggacatcctctaggctgttagtatgctccagagtgcgcgcagtggcttcaaaaatactgtactggtcaagacagactctacctaggcgaacttgcttgagccaccattcggtgagagtttcagcgtgagataaaacttggccggcgttctccccgggaatgccttttaccggcaatgaaaggcaatagaaccctaagctatgcaaggcacaattaccaatgatgacattcccaatctggatcctgcatagtacaaggttcagaatctcctcgtcgctttgtccaccacacgacatactctcgggcaaatgcgctgtaacccagcaataatctggcatgtcgtcgtggggatctgcgattcggcccctgtcattcatgaacacactggcttgaagtttacaatcggacgtcatcctgtaaaatagtagaaaagtccttcttgattggctgattggtggtaaaaaaatagctccctgtggattatgagagaaacgtgagggaaccacggccttctatacgttggcaaccgagacaatctacagtggcctttgccagtctttgacaaagctccataacaatgaggtctttcatagccttatagatcaagtctatatatgctcgatttccacggatttgtcgacaaaggccttgcttgttctttgttatcttatgacagatgagtatggcatggttatttaaggatctacccgctttcatttcatactcatccttcaggtttcattaatccgtatccacagggacaataatactatgatactactagtctagatcgtacatcggtcgttccgtagatttctctactttgttgccactaaagtcccacaatgtgtatccacaggttcgataatgcccagaagaaagcaaattaaggtgtgtggaaattagagtgcacattgcatagggcggaatgtgattatcttccggtcttggagtacttttcaggtacaagtaagattaacccccgctgatcgtcgaggaccactatattgtagttcgatctgaccataaagcaaggaaagccaaccccatcggtctcagacttagataatctaacggtttcgaaataggaaagagcaaacaagttacgtggcattgtataagaatcgacgcatatactccttttggtcatgatcgccttggtgcacctggacaaattcccgttgagagggcttgattgttcgctttgtcaaatactacttctatttgactaccgcacgtctctactttttatacgcatgagcatctacatgactagacccttggatagttacccctctctgcccgaaatatcagtcaccatcttcccaaccgggtgcgaccatagattctgccataatttctctcaaacctcctgacatgttgacgagcattgtaaatcgcggtttcgcttttttctcgattctgcaatgtcatctgtatcgtctcgttctctttaaaatacctctgctcttgaagattcgtcctaggtaatgttcagtgctatagaggaccgttaatgggaaacaacctctaggtatagcggacgagacacaggcaacgtcagtcatggaagaccctggtgccataaatatcgataacctggtccggtaaaagggcgtctcagaggacccatttggactgttatttgccgaagcaagcgatggaaatctacagaactacatcgaccagcatcatactagcattaatatatctttacgacttaaatggtacacacaagccgcggaggcgatccaattcatttatcagaaaggtgtgatacactctgatcttcggcctgagaattttttgctgcacactgtcgccggaaacgagctcgatcttctactctgtgactttggggggtcaacaaatggagaaatagatggtcggcatctccccgatgccagatttttcaatccttgccttccgccggaatcgacgataagcacggatatcttcagcctagggtccatctactatacgataatgactggccattggccctacaggtctccaggtccattcgagtctctagaggagatggagaaataccaagaactgttgacgatctatttgcctctaaaaggtacccgccggttgacggactggcggctggacctgtgatacaaagatgctggacaggagaatactccgatttgagagccctcattgaagaccagagttggcagtttgggaatgatacaatttcaatgcacccataatacatgcggttctactgagccaagacaatgctatctgagctagcgcgtcataataaatgtcctttcaatgccctttcgagatgagcctacggcctccttatcgtaaacctctctgtcaacccaagctcgaattccgatgctggtcatggagctgattgactatgggttcgtgcagccagcctcctctgtctatttgaggccattgggctggaatgcatttgctgtagttgcccgattcatgtatagctggctatacatagtactattgaacatttctgggggcttgagcgctcttaggtaccctttcaaaacaattgccaattactacacctctcagaatccagctgcagctttctggtctatatctaaagacgaaggtgaccgccgatatcagatctcgcactcttccctatatcgttaccggaatatagaagtgccacaatgacattcataatcctttttttgaagagatctctgttgaggatactagtggcaatcaaagctccaaagagatttcaaccaaagatcttactcgtcctaggaagtatccgtggaggaacagaagtgaagtgggcgtctgtcgcgtgtctgggatctgctcaccgccttcgcgctcttcgcgcccagtccgcaactccgacaatgtccaatccagacatcaaggcgctggacattgaaccaagctggaatcgagaattctatatgcccaagagaatgtttcagattgtttagttctctcaatcaccacacaagcaccctcggcgaagacattggaccagacctcatctcttcgatcggcggtggtatcgcaacccttcaaccccgtgagaattcaacagtcaacgcaagaccaccaaaagcactttcccaattgtataagtgggatcgcacagaccggaaaaatcccgaaaattcatctgcaagactctacaccctcgatacaatccacataatgtgtccgctctcagtggaactcatatcggtttagttttgcccgcgcgatcttcgctcgcatatttgaacctcgcaggagtccacaagcttcatagctcacaattacgaacgggaattagtcgggagctatcatctcgaccctccgcctaacacagctatccgctccacttgtgaaagccatggcggagatggaggcggccgtcggcgcaaaccacatgaacggctccgcgaccaaaaagtccacaaccgacccctacgaaaccaaccccgatcgcattcccagcgatgacctgtttatctccctgagtgcgcaatacggccgctacacaccccgcgccgacgatttcacccctcgctttatgaactggtatcggtctgacccgaccgtgaactctttctgggagaaggtcgcgcagaaatactgtaccccagaatactcactaaatatttcaggttcgagggaggcattcgcggctgggagtataattatccgggttgaccgcgaactggccgacggagcggcggctgcgagatactcatctgctaatgcgaatgaactgttagccgcgcagaaggcagaggactcgctcagagagatcggagttgcagtcccagtggtatatttttgcgggacgattgaagggaggaatgtgacaatcgagtcgcgcattgctggtgtctcgctggaagttgcatggaggtatctcgacacggaacagatcgaagtcttcaaaaatcagtgtcgccagatcctccaacggctcgggacaatccattccccctcagacgaaccatcctatgtatgccgtgaactcaattcgcaaattcccccctctgtcgacactcgcgaacgagatatcctatttacagacaaaaccaaggaggaagaactatctttgacacataacaacctcattccaagcaatattattgtccaggatgatcgggtggtggggattgctggctggcgacaatgcggatattttggcactgtcagagccgagaaggtccatcgactcttcagggatcttgggcctgcgtctcaaaatggcgtcgacacctccgagaatggagtgacgtggtctgacctctatgataatgcctacgaccccagtaaaggcactccgctggtcgcaaaccaagatacaccccttccgtcagtcaaaaccgagccaacaagctctaccctcgacaaattcccagctagcaacgacttggacacaaattcactaggtctagatggcacgagcgactacgcgacgtccaaaacagtggcgaatctcaagcatgggctgacgtcgagggcgtcatcatccgaccggtcctccccagcaaattccgtcaaaccagcaaacaaaaagcccacgacaaacactagcaaaaagggaactgcgaagaagccagccgccaagaagcgcaaggtaaatgacccggacgcagacagccttgatgggcggcgttcgaacacacctgtttcccgggccagcaaaacacctgccaagaaacaaaattctgtctcgatcgcagggtcacccgctcccgaagagaagaaaaagccgcagaagaagaagaaaaaagggcccaaaccacctactgcccaggagaatgacgactccgacagcttcgatgaaaacgcgatcttctgtatttgccgccgacctgataaccatacgtggatgatcgggtgtgacggcgactgtgatgactggtaccatgggaaatgcgtcaatattgatcctcgagatgcggatttgattgagcggtatatctgtaaatgcccatgagcgacggatctattacattcaaaactgactttatacactaggcccaaagtgcgcaagcgaaggaaagggatgcacaacatggaaaccgatgtgccgtctgatcgagtgccggaaaccagcgcgcgctaagacgaagcccccgagcaaatactgctgcgacgatcacggccgggaattcatgcgccaacagattcagcatcttaaaaaacgtaccggtcaggctaatggtctttttgaagatttgggtagtatgggtggcattcttacagctggggacttgaaagctgccgttatgggggtgacatccacacaagaattccgaaagctcggagatcgcatcatctccccaccaccacaggtagatgacaaagaaactgctatggctgtgatcaaaccggattcaaatccgcagaccggaagatggttgggagtcgacgtccatgccaagggcttggaatattcacccgatgagattgcgaagatcgaaaagctgcgcacgcagcgtgaggagctccttcatcgcaaggagatgcttgccgcacgcacaacgttcgtctctcttctcaaaccccgcgccaagggcgtagtagagaaactgaaacagcacgagccgaagggcggatggaaagatatctgtggctttgactcgcggctctcgtggtccgacgaagaattcgatgaatggcgactctccgacgctggaaagaaagctctcgcggagggaacagcggaagctttggctgtgagctcctcagctggcactgatgcagacggggacacggcgatgaacggcgatggcgacgatgatattgcattttggacgcgtggcgtgtgcactaagaagcggtgcgagagacacaagcagtgggtcaaagtgcagcaacaagatattctctttgaggaggaaacggcagagcgggacctcgccaagtgtgaggaggaagctcggtccgtggtggagcggggtgtgatgagacgatgggccgagaaggataatcaggcttgaatgccaaatggattttctcaagggtcttccatggccagccggatttcacaaaagcttgataccccttgacaaaaaaagcctcatggactggagttggtattttgcagattataacatagcaggatggtacctagtggctgagtttttgggccaattgcatacaaaacggcgctttgcgaggggatctgtcatgtttgagaataattttttgtaagagtatgaacaattgcatcgagatcgatcaaggtcaactttttctcacagtgatatgataaatggtttatcgttcattgctcgttccatattccccatttgcctagactcgtgccaactcgatctttgatcacttcgactatctgagctcccctcaaatcagaaaccaacaaatgggtatcgatgccttggtctgacgtcttcatgagcaaggtggggaacaaaggggggatatcagaatggaagacggagtggatgccatcttccaacggctgcctcgtagcatcatctccataggtagtagtatttccagtcgagggttgatttttatcccatcctggatacatagatcccagtccattagtattgacaagaatgatcgagagatgagaggcgtgcacacgagacaaatgcgtcaaggtgcgaagtgtagctgtcagaacggctgcacctcgagctgggttggaggctcgaattactccttcggcaagagtatcgagacccgcaataatgaagacaatgggattgctggtggatgggcttgcctcggccgattttctctgtttttctctattatcttggatgtcgcgcagcgcttccgagaccttaccgatggcctgtgcggcattggggaagttttgtacaggaagtaactgcacagagtcaagtttacggattgcatcatctcttgatagaccaggctggtcatgggaagaacactgcagctcattgagtagagtcctcggggcaaaagcctcgaaacttcgtgggtggataatgaacgcgctcggctcagatgatggatggatactccgcaggtgatttgtgagaatgtatcgagggatctattgtaatacatgtattagtctcatggacaatttccgagtggtattgagtcggtcatacctctccgatatactcattgctttcgctgcttctcattcgcagcctggagaagccgaggacaaccccacaccgaaagaccccttccttggaggattggatgccctgtttccaatcatttttgaggttccagtcactttttgcggttgtctcatttgaaggaggagcttcactttccgttgactccggcggtcggagtagagaatcagcaaggaccggaaatgcgggctctgccgagtaaacatccattgtgcttgccatgattccgcgtatatacagccttgtccggttgttacagatctgatatcaggatataagtagaagaagcgaagagtgagcggtgggtggagacaaacgcgaaggtggatattccccgatgtggtctagcctcatccagcctatgagcttcctctttttgatcgactctacttgaacgttcaattcatgttgcttagatactaggaatactatgttggtcttggccatgaagtagaaattgcatatatggaaattttgatagagaacaagatgctcaaggtacattgctgtaaatatattatcaagctcgtttccatattccacgcccatcatgcacccagccaccgtctccaatgacatcgtccaaaatggctagcagatcctgccgcataggctccacatgcaggtcaccgctcctgaactctttcaaacagggcagattattcacagtatacccaaccagggagtacgaggttgcgagttccatccatggatcattagggtccatggaccctcgttgttcaagctcggtaatatgattatcctgagggggagccagctgcacatcaaggcgtcgcaggtgccgcattctcacaaccgcatccagtacaatttgcgagtgattgtaaaatggaaacacagccgtgtaggaaaagtatgtgaggccatctaagagggctggcagattggtcgggcgttgaagcgtacgagttgaatcacgtatcccacttgtgccccattctgtaagaaccgatgggacacatgaaaggaagtactcgtagtggttgtatgctttcagagaagatgactcgttaaaagtcatcgatgtccaagctcgtgatgctagaagactagtacaaggctgcaggtcaggcaggtgggatgggtcccgaggtgtgcactctcgttccaaaaccaagatctgtaggggcatatcaaatgcccagtggtgtccatcattgatcggggtagctagagtgtttccaatgaagactggcggccctattactagaacacgacaaggatccaaatagcggaggactcggcgccaccaaaatggatcgatctgacgatctgggttttcatccgcaatcgaaacaagagacttcacatattgacagaggtctgatttgaccataaacgattggaagttgggttcatcatggagcttgagccggacgtaactgaacagtttcggtcgcacaagttgagataggcgccgtgagcacagttcgaaatgcttgaggtcttttgttggagactgggtgagttgcaaactgggtgcgtgatgtagttgtccgaatgatggtggctccgtggataagtagaagataatctggtctaggagctcattggggagaagttccaatggagacgctggcacagacatgccgaattgctcatgtcgaggacctcgccccacattactatgaacaattggatatccagtaccccgtactgcccaatgtaacagtataccaagagtgcactagtcgactaagatgggggtagtcgtcggctgaggggatgaaagtgaagtgccgggcttccccactccactggctccactgaactctttgtaatcggtgactcagcggatggtctttcgaatggtttttgaaaatgagagttattatagatgtgtgggctcctttagaaaggaatatcagggtgttagacaaacatatacaattaaagggactacgagtataaaaaaacttatagaagcgtgcaacctcgtggtccgtgcactataatagattcgagacatgtccgatacgcaagagtattaggatggtattagggcatgaagatagtattaggtgggtgtattagcattagaatagtcggaatgacgtggaacaatggcactgtccgattgccaaggatcccccctgtacttacagaacaattgcttcttgaaatgacccaacaaggaaatcagcatagaatctactccgtacaaacaggggaaacccacagagtcaccaaattgtggagagcctcagcgttttgctgtggggcatgtctatcatggctggatacgatgtagagcacctcacatgagatgcaatggcaatgtcatgcccctcttttgatttatccgtttcacaaacttcccttgctttcttctcatgttcattttctcagtagatctctaaagtaagatactgtagcatcttataagaacaacgctcatcgtctctcgcagttatctatatactcccttcacaatggctcctcaacttcaccagcgtcctcctttccgcgcagagcatttgggctctctcttacgtccacaccagcttctggaaaccaagctcgcgtatgaggctggcaagatccccgaatctcaactgactgcttgcgaggacaaggagattaaagctatcgttgagattcaacaagagcttggctatgccgctatgtctgatggcgagtaccgccgtcacagtaagagatccggagagccattgggtgagtgaagttgacagatatagtgttctggggtactttcttccccggtttggacggcttcgaggaggtcaacaatgtcgatgtggatgacttccgtccctatgcccccgatatcgccgcatttctagaggccggccacaagcccggtgagagcgtcatttgtaccggcgagatcaagcacgtcggtagtacctatgtcgaccaattcaagtacctcgctagccaggtccctgccaacgaggtcggaaacctaaagatcactcttgccgcgcctaactggtaccacttgcgctaccgcgagggcaaggcttatcccaagtctgtatacaccaacgacgaggattactttggcgacatcgccaaggcctaccaagccgagcttcagatcctgtatgaggccggttgccgtaatgtccaattcgatgaccccaacctagcttgtaagatgtacctacccatccagccaatatcgattgacgaaactaaccttccaccaagacttctgctccgataagttcctcactggcttcaaggaagaccctttgaatgtgtactccgccgataccatgttcgagaagtatatcaagcagtacaatgactgcttcacaaacctgcccgccgacatgcacgtcggtgttcacctatgccgcggtaactttgtcggcagccgccacttctccgagggtggctacgaccgtatcgccatcaagctcttccaagaactgaacgtccacacctactacctcgagtacgacaccccccgcgccggtggtttcgagccgctcaagttcctgcccactcacaagaacatcattctaggtgttgtcactagcaagttcgccaagctggaggataaggaggatatgaagaagcgagtcatcgatgctgctaagttcatcgctgagggtaacaacatctccctcgatgctgcgcttaaccaggtcggtgttagcccgcagtgtggttttgcttcccatcgtgagggcaatgccatcgactgggatggtatgatcaacaagctgcagctggtccgggatattgcgaacgatatctggcccaaccaggcttgaacttggtttttaagagtaaacaataaaatcacttttctgtccgtttttagttctaaattctgcacggagctttttaacataccttggatgaatgttttaaatagttgtctgaacgagcatttgctatctttattcttgaatatggttaacgcttttttgaagtccgattctctgtcctcgtctcattgtaacacaagaagcaacaacggtctctgtctgcttacatgaagcgcgaggagcagcactagcttttgatgccccccgatctcacacaggctgcatcagggaccttgccacttcaagcttttgaggcataacaatcttctccttaaccagtctagcgatcacacgcacagtccacccctggcaattctccgtaacagatttccgattctccgcttggggaggaagctcctcctccgcagcctgtttcaccagcttggctactctggcctggtcttccgacacaacagccagggtgtagatgttggcagtgaagccagcgtcaacgacattgatcttatcagtcgacgggtcgtacttcatatcctgtgcatcccccgtgacttggtacacatatccgtagtccggctcgttttcgtcggcaaggaagagtgcccaatggttgggctctccgggggcttgttcttcttggacgagatagagatagagatggggattttcggccggtggcttcaactcctcggggttggaagtgtcctcagtccaatcctgcgcaccccgcttcctaaagaatgtgcggccgtcgacctcgcacacttctctgagaccccttgtcttgatgggagtccccggcggaggaaagacgctcgtctaggcgaatggggtattaatatcctgtttcctatgggtatgagccgttttattgatacctgctgtaaaatctgccgcatagtgtcgatttggtcgaagttcattttgctggttttgcgaaagtagtggtcagtgtagtgtggtagttacccaggtagatatcgtcagatgacgaaaccaatcaaacacaacaaatatgcagggatcattgcctttaaacacgagtcattcaggcaccgttgaagaatatcattgattcaatcaatctcagagctatttccttgcacaacagccccaaggaactcttcttccgagtccagtgattcttggtatacagtcatcattttttcttttcccttgccttctattggctcttttgggtctgctgtatgtcttgaattaagctcttcaaccaatttttcgagaccctctcctataccccttagattttgcaggtcctcaaacaccatagtctcttttgcttctttctcccatttatccagctcacttcttttgatgcgtatttctttgagttgcacgagcaacctaccttctaggagatctttgctgcgtttgagctcttcgattgttgatcggatttctcttcggagtagcataactttctcagatcggagtgaatcattcagagcttcgagaaagatctgagcattttcggcaagtcgctcaattccagctgcagtctttcgaagtctgtggacagccgagtgcctcagctcccgaaggaggctgatgacctcatctaatggcctcgacaaattttccttcagctgtgtggaatgctgacaaaacaaattggtccatttggtaagctctacagcctctgtacagtcccagccgtgttctttcgggatttggggaaagtgctgctgaacgaactcgaaacaaccttcttccaaaagactttgaatggctgtcaggacaacttgttgacctcggtagtgtatgtacactgggtagagcgatggaactgcaggatttatttccgaatttaggctcgcagaatatactgggttgggtcagcgctcgatgcagaggaactcacgacaatcaaagctcacctttagtttccacgtctgtttcccgttgatgagtagcccgagggataatttcatcttctcctgttgtctctctctgggagattttttgaactgtgtttgcctcatctctcgctgcttccggctccgaagcttccctttctgcgctttgagtaggcacaacatcgaacaactctgggaagcgaattttggctttcagtgtagagtcaaacacccgattctctaagagcttcttggcaacgttgccgattcgttcgacgttgtactcccgcagaatatctgccaatgcgattttgttctgttcaatcaatcctttgactgtcttcaattttcgcacctgagagttcgagccacggaagatatgctggcatgcgggataaaccatctcatcaggctcattttctgccatgacgtagcagaagcttgttgtgtcctaaatatttgcctaagtgccaattagcgaatatttataaacagtagtttgctggaatttctgtgatgtagacgcaagcagcgtctccaatcagtggaatacacctgaaattgtaaccttggaggcaccttcgcctcttcaaccagtgttataatgagactgtctgctatgctttttgggaggtcttttcacttgatctcagggctgtcttaacattgttcttccgtgtttggaactccaggaatgcttagttggacacaatacccgcaaccaaccgtttatcttcagcatcttggcctacgcaccgagaccgatcgcaggatcacggtgcattatataaccgtcgaatttttgattgctttcatcattatttttataaatctcaagaatgacaatgcacatattccaagcaaatagaccgaagctagtttacattgtatacttgcatggtgcttcatgaagaacgtatcggctagactagctagtactagtaatttcagtgaaacttctcagaagagaatcccactgaatgtcatcaatagggaatatgccgtccaagtcgccatatatcgacggccaaactgtaggtgccatagcaacatcattgggaggaacttcccccatagacacatcctgccttgcatcctgagatagcgcattttcaatgatatttctgacttggtggggataaattcgagcaagctgccgcattttattgcagagactgcccacaacatctgtctctttttctgcagtagacatgccctcaaacctcacatccaacgtgttggcaagctctgtgacaagactggggtaatctgccatatcgataacagcttgggcttgggattcggtggaagagtcaataggaccagtaatgagattgagcagggtaaatactaaagtgggaatgtagcccactccaatacataaacgagcacttgtcgatattgtcatttgactgatttctgatattcgcaaatttctgatcgtgtgaatgagctctttgctccgttgaatcatattcattaacatggtgatgcggactgcgtgggtagattccatagtccacagttcttctcgaagacatagttcctcaaggcgtacctcaatgtacttgagttctgtgcgtattgcattctctgcagagatcggttaatcccagccaatcatataacttcaaataaggtccctgacatacccgttgacgaaggaatcccggcgaggtctttctccacggatgctttcaagttattgaactgttgcagcagacagccatgcatgacctgggcttgtactgttccaccacttggctgtatcgaagcatggacgtcatccaatgttgccaaaaatgattgtatgtgaatgaacggtgcgatccatcgatctgaaatttgctcggttgatgataaattccgagtgcacctatcgatttgaatatctcggctcatgctagttagccgaccgagacttccatggaggctgagatgcagttagttagagctgcatctaccagtgcagacagtctcacctagaagacagccaatatgtgccaagtaatgcccgctgctcatctagagttaatttggtttttttgtgtagccccaaatcctgtgaaatagaaacaacaaattgaatcaacagcagaagccgcgggtgatgtttctccccaggatatgagtaccatgcgctgtgaacaagcagaccacggagtaattcgaggtttctctcagatcgtgccacgattctcatggtgacatgcttcataatttcatccgcgacaatcttgcgaagaggggacgcactgccgatagtggcagctacaatgcacaaaaagaggaaaggctgtgtacgcctcagactttcagccgtctcaccgcgtccaagcagaacaaaaggaaatttaggaataaagtcaagctggaaactcgaaactaagcgctcagcctcggcttcgctcaaaataccccgatcaacgatagtcggctggccctccatcgcagaggtagtaggcggatcgggaccgtgtgacggatcttgagcagcagcatgcagcgcgtcgatgtctaccgaatccaagtccgggtcatgactagaggccgagtcgtgggtgggcgggttgagagtatcggacggggtcatcacggtgcgttgggtcaaggtagccagctgtgacatcagttggtcgaccttcttctccagtacatccacacggctgcatccgttattaataaaactagcgctttttgttttgggacgaatcaccttggtgcaaccttgtgctttcgcttcgtctgcgggaggtcaaggtacgtgcatgccttgcccaaacgagcgcaccgttggcacaggtcagcagcctgcggtgtacatttcgccttagcggccgtgcaggccacacaggctcttcttttgacagggactgtggcgctcatgatgtcgctgcgggaaacggagcggccgatcaagatgtataagccgattgctgagcaatcggagggggaaacgggaggaccggagcgtccggtcggcgccgatttgtaataatccatagattcaccgaagtatataacacgagtcaatgtcgaatatcgaaatagaatcatcagcatagcaacttattccaagtaatcactggatatagttcaatcaattcaataaaaaatggcctcatacgcaatcaccggagcctccaagggcattggcctcgaatacgtgcgtcaactcgccgccaacaaagacaacacagtcctggctattgtgcgcaatcccgagtcgcaaggaatttctgagcttgccaccagacatcccaatgtccatgctattaagggcgacgtcacagacccaaagtccattctcgatgccgcttcggccgcagctgccatcacaggcgggaagcttgatgttctcatccacaactcgaacgccgttgatatggctgccatgggcctcaatccgtcccaaattcccttcgacgctgaagccactcggaagatttttgagccatcgcttagcacaggggtttatggaggtctatgggcgaccaatgccttccttcccctgatcgagaagggcacccagaagaagattgtacatatatccagcgccatggcggacttggatctcatcatcaagtcaggagtcagctacgctgtcgcgtactccgtctcgaaagctggaatgaatgtgcaagttgccaagtacgcagcggagcttgcgcctaaaggaatcaaggtgcttgctttgagccctggatgggttgatacgtgggaaggcggtaaggagtcatatatgccactgcattagagataaaatctaacagccttgcaacagagaaaccggccgaattaattcaagcgcttgccggtatgctgtcgcagtttcaggcagtggagccaggactcacggggcaaatccagcccgaggaaagtgttcgaaagggccttcaagtaattgagaagctggatgctgaatctagcggcttgttcttgagtcagaatggaaaccagacaaactggttctgagcactgatgagctgtatcagtggatgtacagtcatattcgaaatcagttttatctccaccctcttgtgacttgattcccgaaccctaactccagacacgctgatctacattctgtcgatccccaattccaagaatagagattttattttacatgacgcgggtgggaccccatgtacggagtatattacaagacagaaatccaaccaagatatacaggtggtctaaacctcgatgtagcaaattgatgctacaatggcttatactggaattctggaaacctctagacaaagcaattcagctcaatttagtatgctaagtcaatatacatctcccaccggcatggaaagacatcggtttactccgccggtccctcgatgtttctctcctttatggaggaggtcttgtgggtgtgcaagttctcgatcgtatagcgtgtctcctcatctgacgaactgcggccccccaggatttcacgaacgagtccgacgctcatgctggttctggattgcgggcctattggactttgttagacagtggttcatttggacatgcatataaagggtgcatcataccgccgaccggcttgtaattgaccttgtctccttctttgaaatgaggcattgctgttggttgcaggcgtgtggaattggatattccgagaacatgtattgggttgtacaaatttgcgtgaacaggtagagtcttccgtatttgcagacagaaagagtgcaacagtcaaccgaaactgtcattatatttatattggctcatgatggggaaaggagttccgctatcgtcatattgaggtaactggagaaacgagctgactgggttggaattgatggctatatgaacatctagatccattgcggaggtaggctccgtggaaacgacagcacccgaatctgataacgcacttcaatcagaagtatgtcatttgtttataattttttaggaccaatgccagaacttgtctatcttgtctccgctgtagccaatcatgtgcataagggagcgcatccacaaaagggtatacaaacaataagaacgctagatgaagagcaaaatgaattaaagtattaaattggacccaacaagcccatataagaacagaggggatatcatagaagtgaagataaacaatggtaaacgcaacgagataacgaggccaacaaaagaaaaacaaaaacaaaaagcccaaatgctgcatggtcttgtcatcagaacacggacatgaagagaaaagagaaaacacttgagaatgcgagatgttgtacatcgaagctgctctatgagcgcctctcgaaatcacagcagtgtatcttatttctggggctgggtcttgacattgtttgagagccaggcctagtaagaaatagcatggttagattgacgtttccaaagagataggtcagcgatacgacttacaagaccctcgaaaatacctgttccatctgttgcaacactgggcgcaacgtaccacaacttgtccttgagcttagtcaattgaagctgctgagtaacttcctccgggcttaagtctaggggtgggtcagcggacatattcatcggattccagagacaggagatacgcacggccaggaacatcttgcttgttggcgaataccagaagcagagcatccttcatttcacggtcgttgataatcttgtgcagttccgagcgagcctcctccacgcgtgctgtatcgctggagtcaaccacgaagatcaatccttgtgtaccggaatagtagtgtctccagagcggtcggatcttgtcctgaccaccgacatcccaaacgttgaacttgacgttcttataggtcacgctctcgacattgaatccgacggtaggaatagtagtcacgtcctggttgctgagtttaagtttgtatagaattgctgaagaaatgttagccaatcgtgtccggggtctctatctaaggaggaatcgtactagtttttccagcagcatccaaacccaacatgagaatacgcatttccttggtaccgaagatctttcccatcatcttagagacttgtccacccatttttgcgggatttgacgcggtgtcgggcgtgctcaggagctgtttggcggaatatcaacaattgcgacccgccttgtgtattgcgggtttcgaatagagattgaaaggcaccggacgtttccgtgcaaagtggcttcgattgagatgacttcgtcaacgaaaggacaggaaaaggagaaaagtaggtgtgttggtgcgtgaagaccttcaatccaatttccctgaggcgggggaacctagaaaaggggcttgggctgagcttactcatcatctcctctccacgaggtccacgggggcagtttcatcctctcggctttggtttcatgtatatcaaatcattctcgaacttgtttcattcatgattatacccattccatggacaatatattcagatatctatcaaaacacttcgatgtcattaaatcgtaagaaccgtggttgtgatcttcctcatccacggcggtattactccgacagtatatatatcttccctttccttcatcaagcactaattgcgaacaaatgtcatttgatcaggatataatgccaattctaacaatcaaaggccttcttaagcgcctatttaacctaatcaacacgcacctccgccatatatagcagcatgcatctgatatcggagcctctaggtatatactggcctatctccccaacaaatacattggcggtttggccgagtggtctaaggggattgactagaagttctagaaatcaaatctgttcgtcggcgcatgcagctgtctttgtttctttttctttagctttctcgagatagaatcggaactaacggtttcctaaatatagtgcagcatgtcacctcgcttataagatacttcgtactcgatgacaattacacttctactatttatgtacacatccgagtattctataaggtaaccatggataggtttgaaatagttcgagaaggtgaattggcgttacgtcatgattaaatgaagtcattcgtcaacttcatggacatggctgatagctacttctttgattatttcttggataaattcagttgcttagaatttctaagaatcatgcccggcgaaggacaatcgttcgaacgccatgcctcagtcacacagcagcgtcgactcgcgctacagtacaagcgtaacgcttggttagggccaccgtcggatgtatgaatgtctccgaagtagcagtaaaagccacttctcgaaattctcaatactaataggaatactaggctatctacgccggtatctctagcaactttcatgattaccatacgtcaactatagcgatcgcaatccgcgataccacatatttactagacttcctccagaagcagttctcacccgatcaagcctctacagaggaggccaccgacttcatcatttccgagctgaaggcatattctatgaatcatctggagaaaattattgggatagcaatgcctgaacatgttgcaaatcactgcactcgactgtgccctcgcctttgggcggagctcgacatcattcccttggtcttgtcgaacgcaacactaatagacagagtcaacatcggacaggttagcgagacccgagacccgggatctaatggatggagtgagaagacgatcgacgagcaggctgaatccatggcgcgaaaaggtgttaggttagttggtcccgctcaatgccataaaggagccattgggtctaagtgcgcgcaggctatttggaccggacaacatgcccctgctacaagtgggcttcttcgggcttgtggaagtagacacagcctaccatgtgcaaatggcggatctgagcgattttcagaaaaccgtctcggatagaacttggtccgcgatgcagcactatgccaatgaattgaaagaacgcaataccaaagtggcatttttcagctccacgcctcagggtggtggtgtggctttgatgcggcatgctctcttgcgattttcacattgtctgggtaccaacattaaatggtgtgtctgtgccggtatctgtgtcttgaaatatgaagcctaactcaattattgtaggtacgtcccgaaaccacgcccgagcgtcttccgagtgaccaaaacaaaccacaatatcctgcaaggtgtcgccgatcaagatgaccgcttaacaccagagaacaagaaactcctgacggagtggattgaggagaataccaggcgatactggacccgaccaggcggacctttactttcaccagcagagggcggcgcagatgtcgtaatcgtcgacgatccccagatgccaggcatcattcccatcgcaaagagactagctccaaatcgaccagttatatttcgaagccacattcaaattcgaagtgacctggttgcaatatctggctctccacaggcagaggcctgggaatacctgtgggatagtattaaacaagcagactgttttatcagtcaccctgtgagcgcattcgtgccacggaatgtgcccccagagatagtaggctatatgcctgcatcaactgactggtaagggccgaagtccgataatctgcttgcatctgtcatctcactgaccgggacataggctggacgggctgaacaaaaccatgcgcgactgggacatcgcgtactatggccgcatcttcaatacaggctgtcacaactcggatatgccaactatccaatggcccgagggttagtacctgaaccagaactagttatgatgatcacattccacggtgaaagctaacacgaggatagactcatatatcgtccagatcgcgcggttcgacccgtcaaaaggcatcgtggatgtgttagtttcgtacgagaaattttacaacaaactagtagccgaagcgcctgatatgcaccctcccaaactagtgatttgtggagaccgctcagtagatgatcccgacggagggcggatctacgacgatatagtcgactacctggacaaaagagtcccagatatccgccatctgatctgcgcgatgcgggtgcggccctgcgaccgaatcctgaacgccattctctccaaggcgactatcgcactgcaactatctacatccgaaggtttcgaggtaaaagtctccgaggcaatccacaaaggcaaaccagtaatagccacacgtgccggcggcatcccgttgcaggtgacgcacgggaagaatgggttcctggttgatgttggcgataccgatgctgtggcgcagcgcttgtttgagctctggacaaatcacgatctgtatacccgcatgtcggaatacggcatgcaaaatgtaagtgatgaagtgagtaccgtgggaaatgctctcgcctggctctatctctcttccaagttgccgtatggacctgttctgcccaatggacgttggatcgaggatatggcgtttgaagagattggtctccctaacaagaacgacgatttgcggctcaaacgcgcagtccaggtggagaatatgggttagttgtacttttttgtttgactctccttcattagcagttgccagtatgtatatacagacaaaatccgaccatctaccacggggatacttaattagtacacagatcgatacatcaaaacacaacattgaaagtagcatgggggtatcataaaaccagaaaaagaaaccaaaacaaacccaccaacccctcaaggccgtccaacaacccgatacctctccctagccatacctccctctgccccctcaacaccatatccctccccaacctccccgacaatcctcgccggtctcccaccaacaatacaccaactcggcaccaccattccaggcgggacaaccgcgccatcgagcacataagcatagtccttaataatagccatactgcctatagcagcacccttcccaacatgaacatgattcccgagcgacgcagcctccacaaccgcgccctcgccgacaaaaacatgatcgccgatcttgagcgggtagaacgagtatatgccgcggtgtagccggctcggcgggcgcaggatcgcgctcttggagatgtagctgtatcgcccgaccgttatcgctacgctgggcgtgctcgggctcgaggctgctggcgcggaagggttgtttggatcggtgggagggggaagtgttgtcgtgcggaataggtcgccgcggattacggcttcggcttggattaccgttttgccgcccaggatgatatgttgcgtcccgtggatttgagaccgtcgggagatcttgtttcctgtgtcctgattttctcggcgggttaggtaggggttcttttgttgtggggtcggttgggtggtttcaattgggagggtaagttagggggatcacttacggtctcgatgtattcgccctttgctgcctttggtggagccattttgaggaggattgaagagctttctgtcgtgggatgctgcaattgtggagttggagttgcaacaaatatagctcgaccccaggaatctagaagatgcggcagtatagccccaaggcggtgtatgtaaacaactatgacgatttcgatagaccgattgcaatgaatttcttagctattgttaagttgcactcagatgggaaaaactggaattaatgagatattcatgaaatatacactacgctgctgtcattaaagcttcaacaacctccggatatcctgtcaaccaaacagttcgtcgaaaataaaacagtcaataaaaaaaaggcatacaatcatagccaacccaaagtaaattacccccacatggcatgtccgcaattttatatacgatgcttcaactgacaaacccaaaagaaacctctcaggaagatgtagtcttcttcttctgctccaaaggaccatcccagtgcagcttaagcgacatggggaaggcactgtaagcacttccgtcaccgcggaggtaaaaggagtagccaccttcctggggaaccttcttaatctggccctgggcaccggcagcacggcggagaccctgcagacgaccgacgacacgcagcatagcaacgagcgcgattttggtgatctgctcgccgaaatcggtggtaggaccctgaccgtggttgagatatgagccaagagggcggtcaaggttgacctggttgggctcggggaatacgctggggtcgtggttggcttcgtcgaaggaggcgaatacttgctgcccgggctggatggtgtaagttttgccgtggtccacgacggtcacactttgcttggcctcgcgcaaggcgccaaaggtgccgttcaggcgaatagcctccagacagtagcggtacagcttctcgtccgattcggcagaatcggcgttggcgaagcggttgatctcagctaggtgggccttgttctcgggcgcggtgtagaactcgatgatctgggtaaagacctgaccctggctgggaactagaccgacgatcgtcgggacgattgcagaccaggtgatttcggaagcgctggagccggcttccttcatgcggcggatagcttctgttccgaactcgcggatggcgttgtcatgcggacggaagctgttcatgatgccagagaagagaccgctgttggtgtcggccttgacggtcgcctcaacgacctggccaagctgggtagagacggcggaggcggctcggttcagagagcaagagcgaggagcgtcgacgtcgaagaagagcgcggagaagatggtggcaaggatcatgtgcatctcgtgttcggtgaataaaccctgcggattctgctcggtcttcaggggaatgccgaagagagtagatgcaaagtgaacgtgggccaggttgccgacatcgcgagtgatatcgatctggttgatcttgcccagctggccactcttttcagaaatcaaacgctcggtgatatcttcgtagaaggttttgacgagcttaggaaactcctcggtgttgaaagccttgccgatagcctcgcgttgcttcgtatcgagctcgcccttgccgaagaggtcagacatggagcgggcccagctgggacggaaatctacctgattcgagatcaacagactggcactttcgtgagaggtcaggttgacacgaggctcagtgaaggcgggtttgtcccaggagtaatcctgctcacggcctagatccttcatgattttgcggttttcgctggggattgtcatggggtagtgggcataaatggagtctggcttgtagtgattagggaaggcgcgcgtggccagcttatagaagatacatccctggttgatgttgaggtcgtagcggcactcgttgtaaccccagttggttaggttacgggggttgtaatcaatagtgtagtgacggtcaccgcggacaagggcgacagcatccgacagcacagcacgggagatggtgtaggtcggggcgatgccgacaccagggatcatgggctccttggcctcctcggtgacgataccggggtatagttcaatgtaatcggggtggtcgtagagatgacggagagtattagcgatctcggggttggagttgacttcttcgaaagtctcgtaagccttcaagccgaagtgcttacggaactcgttgagagaaccgacgttccatctacgcgaagcctcgataccgaggatctcgatagagcgcatggccttgggtacgtttcggggaccgaaagagctggccacatcctcggtggcatgggtcagaatatttacaagctctccatcatcgaaatatccattttcgtcacgcttcagacgggcgaaggtacgcttggcgggatcagcatcgagcagaccctcaaccttcttcatacccatcagtagctcaggcatggtgacctgctcggcaggcttgcccataaggtcgtagtaaatctgctcaatccacttctcgtcaccctggctaatggccgagtgccaacggtaggccaaattgaactcgacagagcactggttgccgagaccggaaggagtggaaccggccttctcggcctgggcacgaggatccaagcaccaggtggagttggtgcggttcaggttgacaatggtgcgcaggtaatcatacagagtgatgttgatgtacagaccgcaagtgataagacggccggtctggaacaggtcctcatcacgcttggcccaggctttcttggtgtcctcctcggacagaccaggacggggcttgctgaagcgaccattctcgttaatctcagccagctgggtaacgacatggttgtggaaacgattcagcataaccagcaaaacaccacaggcagcaggaagggcctgcagacgaccttcagagaagcaatcgggcttcaactttccgtcctggcgggagcggatcagatcctgctgctcctggatatcaccatacaaaatggacaagtcaaggtaggcagaggtcttgtttatgtgctgctggcggtagtcggtctggaagatatctatgtacgaaaacagcatattagcgcctgaattatagatttcagtggggtcgacttaccgtgaataatcaaagaggcccagtcgaagaaaacactggagaccttgttagggtgcggagtgaactcctggcgagcaaagagggtatcaaaaatcagaccggcgtcgggcaatccgctgggctggatggtcaggggagaaatggtgcggcagtatgcagtattagcagctcccagccacgggagagtagggttgttgttggagccatcggccgagcgatactggtactcgtctcccatgtaactattcacagcattagcgcgcaattgcaacacagcagtctccaaattggggatttctcacgagagaggtgggtgaggaagtgagttccatagctcatccaggaacacactggtgagctcggtgcggtttttggagttaccgggcaaatccgcgaccatctggattatgcgctccatcaagtaggtcttgtcatcaacaagttcgccggaggctttgctcaaaatcaggtctttgacagtgttggcatcgcggaatcccagtgccttgatgtcattgaacagaccggacgacttgtcatgcttcatgtatgcgccatcactggtttggttgggcagaggctcctgcgaagcgtgaattgcttgcgcatatttctcaaatacagcaacgacctctgcacgcttcacgatgtggttgtcctccttagtagaggtggacttcgggactggcaagaccttagaggcacgcctgctgctcttgtctatgctcttgggctcgatgtcattgcaatccttgcaatccttggcttccttggattctttggagtctttagagtccttggaccgcctgaattgggtagagattctcctcaacattgtgaaaaaggaccacaaggacaagttgtgagaataaagaaaatcaaaagagagatacaaggttgctaccaagggccagataagggggaataaatcagaagctcgacggtgctctttaaaacgagctgttcaggcgacgcaagtcagctgcaggactgtggagcgtctgaaatgtggcggatttgctatcgtcaatagctgattgactgcgacagcatttgatttgatggagagcaataggacgatctcttctcgggcctagtctctgtaacaaatattccagccccgcatggtgcaagctcaattcccaattaaagtctctatagtggactctcgatgatgaggtatctcaatatagtaactgatcatcatttatgacttggtacacgaaaaaggggacatctgctcgaggtagtatgtacagaatacgcgaacaccctgcccaggtggaatcatatgattgaatatcagatataatagccatggttgcggtatgcagggcataacccggagagctgaaaggcaaatccaaatgtagatctatattgcacgcttcggaagagcggataatcgaccaatgactgtgagtgctgtaataccggactataatcagcggtgtacatcatctgtacgaggtactcctctgccacacagaagtgcagacggatctcaagatcgaaataaatcgacaccaagtggggaagattttccgcgaaaaagaaattccaatgtacttggtggctggctgtctatttcagaacttgctccaattagggttatgtgtgtaggatacatccatacttcgtaggcgtgacgcaaggtccctatggtaatgtgatagagcagcagagatgtccttggaaaaaagcaaaagaaagaaacctttcttttttctttttttcggttttcgcttgtttcgatcgtcgctggcccacctgttcatccacttactatggattttaagtgacgaacgggccgccagccagtcatcgtcgcgaattattcagaatccgatccatctcggggcatccacttcatccactttcagggtcttagttcttgtttactccgtaccccgtgtcgctcccactgtcctcgtggcgcttttcctaggtagaacgggagtttccacgcgagaatgagagaatcagagatgactccttttgaaaaagcaaagatggtcaagataggagtgatatttcaatatcatagttcgacgaaccacggaccattgcatggggccgctcccggataaccaatccatggatggataatctatgcataaatgctttagattagctaccgatttacaatgattcctctattcgcttcccttttttgggggatacgaagagaaggctggaagtcccactcttcttcccttcccttttaggtattgacaatcctttcggctgggaacagttccacgtgaaaatgacaaggttctgagtttccatattgtcagtaatcccagattcccagattgtattaggtcattataatcacaatgacacctcgagaaactttctctagtctgactttgccgaggaaaaaaattgacggttcaccagtgggtcgcggccctaggccgtgaaggaacatgaaccaatacgtatcgatcgatacgatgctatggcaagctagcgccaaagctagatccgatcgctcaagaccgaaccgatgcgccggaactctctcaataggaacgccccctctcaccccttacgcctcctgaatcaatgttgtaatattagtgaccgagtttgtgtggagaatgatcgacaataatgtcccgagcaccacctagcatcatctcctttcaaaccctcatagggccaatgattagtactgtactccgtagcaaaaagtaagatctgcacgtctcgctttggtctctcttcagctccatctcatgggaattccaaatacatacactaggtgaccaggtccgcgccgcgcaacttgcatccctcgtgcagatttttttcgagtcaagctcaggcctgtttgcaacaaactcgcatatccagcaattactgccggcacatctccattgggtaggatgcacccccgctacgacgaagtagggtttcgtgtaacctgcacctgcgggcaagtcagcgattgttgacaggaaataattccaaaaagcaagaggcccgcccatgtttgtgatgggaatgtgccaagtctgggggcccgcccgtcaaccaggtttggcttatttttcacaaactgcagcgatcggctagtgggttgtacattgttatcctgcaaaccccccttctcttagatccgatgtagggcgctgattcgtgcaatgatcctagctgtacggagtacccagctgcataagagagtcatcctaaccttgagccttccccctttctcgtatattgcctccttcagctctgactaggtgtgcctggagtcttgaaccttttttttgtctgaccgacggaatcgcgcgatcatggctgatgggtatgaaactcaaggcccgccgggcataccgaagcagtttgtgctttgctttgatggtaccggaaacaaattcgccggtgacgagtcggatagcaatgtgctcaagatctttcgcgtaagtgggaccgcgagccaagcgtgtggaccatgctaagaagtcgcagatgcttgaccgcagcaaaagccaccagtatcattactaccagccgggcattggcacatatgtgacttcgaagtcactgactagccatggccgaatccaacgtatcaagtccgcctatcaaaaggccaaggactcagcggtcggatcttcctttgacgaacatgtcatgggtgggtacaagttcctgatgcgatactattcccctggcgatgatatcttcttcatcggctttagtcgtggttcatacatcgcgcgatttctggcagagatgctggactatatcggtctactcgaagcaggaaacgaggagctggtccgctttgcatggaagacattcgcaaagtggcagcagcggtccaatgactcggaagaagagcgcgaagagaagaagaagctcttcacatacatgaaggccttccgtgagacgttcagtcggcctatctcgcgtatccgtttcatgggtctattcgacactgtcaacagtgtgccgcgcttcgagtccgcgtggatgcaacgtaccaagttcccctacacggcacgcagctcagccaaggtgattcgccatgccgtaggtattgacgagcgccgcgcgaagttccgccaggatttgatctctggggcgcgtccaaaggagaagaagaaacaccgccgccaccatttgcaaatgcctaagaaccatctgcacctcttccaccaggataacaaagagaagccccacgaggaggtcccagacaccgttcctgccattcgggtcaatgacaaacccgaggaggaacaacaggaagaagagaatgccgaggctgaactcaatgcatccagatatgggcccagcactggagaaacatactaccatgccgggcaccatacctcgcacacaggctcgcagcaaacctcccgcgccgggagcgaaaacgggacaacgcagcccgacacataccgcgcacgctctccccgacgcaggctcgtagtgcccaaagcgtcaacggacgatctccgctcattgcgaagcaaagagtcctttcacagtttgcactccaacaccctctcggtgcaaattcccgttctcgaggtcgattccagcgacgacgaagacgaccaagacatccacgaggtctggttccccggctgccacgcagacatcggcggcggatggacactctcgagcggcgagtcatgggcactgagtcacgcgccgctcgtgtggatgacgcaagaagcgcaaaaggccggactcgagcttgatgagcgcaagatgaaacaattccaatgtctggaagagttcgacgatgattatagctccatccgggaagagattaattcccagcggccgggccggtgcgttgcgcctgatactgataacgatgatgctttccgctctatgcccgatgataaggagcgcagtgttgcgagtcgcgacttctggcatgcgctgtataccgccagtacgaagggtctgatgcatgactgcctgatgttcaaccagggtattcctaccatgtcggttatcacgtggcgcattatggaatggttaccgttccgtcgtatggatctgcagcctgatggatcgtggaagccgattagctggccattgcctcgtggtgaggtgcgggatgttccactgaatgctgagatacacgtttctgctatccggcgtatgcaggcggatcccaaataccgtcctggtaatgtgattgtcggtggtggtggtcgtggtatacgtgttgcaccggaggagtatggtattggtgaatgggtggtgttcaaacatgaaggggatttggtgcgggagacttacgtccgcaagaacatctccaagtgcaaggagggcgaggaatagactaattctggttcttccttggttcatattatatatccctttctatagtgtctaataggtaatttggagaaattgtatcaaatgctatgtgtctattcagcatatcccctctgcctggccctatacactatcggctcatacactcgtaaatagtcgcggcatatctactttggtggcaattctatagctaatgattatccttctagatatcatcaaggagaaactcttcatctcaaaagacccaaaaagaccctagaacacctactccgtatagttgtcaaacatgtgaatatgtggatatgtggatagagccggcgagggactgccatattgtgttagctatgaaatgaatcaaagaagcccgatagttaagctagaagagcaatgaggttcaagaaagcagcaaattctggactcaatacatcatcgtagagagagaggtgatgcgcaatcacaacttcggcctccccgctcatcatccctttcgaccttctgttcagaaggacaccctcatcgccagttgaatcaaacataggaagcaaccaggcagtttctggagcaatcgcagatgatatttggtgcgatcaggattttcagtgaaaatgaagttccgcttgggccatgggctcctcttatgcggtcaaccttcgtctttttcccttctcacctctttgaccttatcatattatttctcagcctccttcgtttttgcttctggcaggtccaagagtctcctcctttactctatgccatgatgcgaaggtaatactcacttacctcccctctttccctccgccccccctttttcttctttttttacacatggagacacctggagagatgcgccctcgcaaacctgggaccaacaccggggtcatccccgttgtccccgaggataaggaggacgtcatgattactttttcgctgtctgaaccatcggcatcacctcggacacgatcccctttggcccgatcgcatctccgctctcgatcactggcgggaatcccgggcatgccgtctatgacgcgcgcttattcttccccagggccggactcccagggtcgttatatcttcatcaatggccgcggggcaccagtcgatgcgaaaagatctcccctgcaaatgcgccctgacgattacagcgaccgcatgggcgccctcaacatctccgaaaccatctccgagaacgcagaattagaaaccaatcccaaatcgtcttcacagccagcctcatctcccgtcctgatgccgcagacttttccccgtatcaatcgcctgcgtccgacttcaccccttcctttccagactcccatcagcccctccttacattccccacccattctgggctctaaatacaatgagtcttaccccagccaccccgggtctgtttcgtccatctccgtcccctcaactccgaccagcctgcgctcccgaagccccagcatttcgtcactggaaacaatccccgacatccccgacgctgagaatgaggcccttgaagaggatcggatcgcggagctgaaagccgcagctgatgcggcggacgcggcaagtactgccaaccgacggcgcggggcatccgatgcacccagttcattcactacaatgcgggggggatcgggcggatatgcaactcggagcgagaagcgcaagcgatggagtgtctgtggtgccgagcgacggcaggatctcgacctagagaccatttgggaggattgaagggtgtttcccagtctcaaacgagtccaaccgacctgcgcgccttgtctactacgaccaagtactacctgcgctcccacattgtttcatagtggagttgatctccacaacttcttatctttgctttactcggtggcgctttgctccgttctctgactttccttgatacccttacattacctccaactcgtacctttcatttgcagtcctgtttaccatttcaaaaagcgcgttcgtcatggagttctacggcagtggcggtggtacgtacgatgtacccgcttttagcggcttagcatgttcgactcggcccatccattgttttattatgctggtcataactccgtccttttctgtttttgcggtgccttcatttcctggcatctgtgatgtgatgtcttcattgcttcaatacaattgagccttttccagaataatctatcctgttccgagtaaatccattgtaaccactacgatgtagctggcattgataaggacatccaggtgttgataacgggaactaatcatccgagcacccaatgacatgcaaagaatcttcacttgatcgtcaaaccttcatattcaccgacctcatttccaggtgcatcagccgcatatcctaagttgcttccggaatggctccgagtccgcacatcggcatcatcggcgcagggatttcaggcctccggtgcgccgacatcctcatccaaaatggagcccaagtaacaatcctagaagcaagagatcgcattggtggcagagtatgtcttccttatacccggcacaactgcaagaggccaagtagttctttaactttcttatcggctaggtgcaccaatcaacagttggagaccatatcgtggatatgtatgtacacgtacatgactatgacttggaaagtatgcagctaatgctcaaatcagaggccccaattggattcatggcgcgggggagaaccccatcatgaccatagcggaagaaacggggtctgtcatgtatgatcccgaaggtggagcgcatatctcctactcgcgagacggccaccctatcaacgacgaagtgagcgctaaagtccaggactttgtatggaccactatagcagaagccttcaaatacagcaatcaccatggagaaagcatccccgtcgagcaaagtctattcgatttcttctgcgatcgagtccagcaaaccaaattctcagatgaagagaaacagctttgtctcgatgcctgtaggctttggggtgcatatgtcggtgatcaagtcgacaggcagagcttgaaatttttccgtctggaggaatgcgtggacgggagtatgtacctttagcaaaatagcccggagacgtatagcagagtttctaacatcatcaaggcaacttcatcgtggcatctacatacaagcgcattctagagcacatcgccgaaaccgccactgcaaaagccgacatccgcctcaatgaacctgtcacaagcatcaaagcaccacctcacaacaaccaatcaccaacaaagcaccgagtaaccgtaacaacagccacaggaacaaactacaacttcgacgaagtagtcataacctgcccactgggctggctcaagcaaaacacctcagcattcacaccggctctcccgccccgtctcgaacaagcaatcaacaacatctcatacggccgactggaaaaagtctacgtgacattcccgcgtgccttctggcacacccaaaacaccagcacctcaacaactcaaacgcaaactcagaataccgtcttcgcccaattcctcgaaccatcctactacacccaccacccagcacacatagaatggaaccaagaatgcgtctcgctcgcctcgttcccagaaccacacgcccatcccacccttctcttctacacgtacggcgacagcggcgcagagatagtaaaccgcatttcggagcaagcgccctcgtcgcccgaatacagggaatctctaatcgacgtaatgcagcccttttactcccggctccccgggtacagcgcggagaacccggattgtgtgcccgtggcgcttcttgctacgcaatggcagaaggatgtctttgctgggaatgggtcgtattgtaatttccaggttggggttgaggaggcagatgtggatgttgaggttcttaggtctggggatgggattggtccggttaggggtctttggtttgctggggagcatacggcgccgtttgttgcgcttgggactaccactggtgcgttctggagtggggagagggttgcgagattggtttgtcaggggcttgggattggggaggttggtgggatgggggttaaggatgattctttgccttctgctggggatgtgtcttgatcagaaggaagggttgtatggaaactgatacatgaggaattgataaatatttagacattggtattatgacagatggttcttgtttgaagaactatatcctgggaacaatggtgatagagagataccgtacgtgtctaaaaaccgcgaggtgtgtcgattatacaatggactcagcaagttgaacattttcattcatacttaaataatatatttcagttcgttggattcgttcaaggattagtatctttctcgggagcttttcacatttgttcagtgaagcccccatcaatagcaggccaggaggaccaaccaagtccaccgagtaaaacaccatagaggaaagataaagaaccatgtagatccatatgcataagaaatgcagggaaagaaaaagagaacagggcccgaataaaagtatataatggacagggttcacgtgacagtggcaaaagaccgcctgcaagcacatcatgaacacagcaaggagaagtacagggctccgaacaaaggaaaatgagtatcacaaaggaaatgaaaaataaacggataggcaatggcgcttcagaatgtcaatgtatcaatcatgcatcccttcaaggtcatcgccaggccccctggctcagcgacaggagaccctgcacacagtccaggtcatcttcttgactatccccggcgccaccagccatgaaagccgatacttctgcactgagttctggcggggctttgccctgtgagccggcctggagtgcccgattgcgtttgccgttggccgagatgccgagaccgcgattacggttagcatcacggaggaccggtcgtgggatgtgtgaagtgttgcggcgacgaatatttgtcgatcgtgtgcctggaacccagttctccttgtcagagtcaccgaggtcttgctccagatccggtttgccagacttggaaaatagaggcttcgagagcttggatgggttcacgttcgctttgtttcggcctgtttctaatcgccccagagatgaaacagcgcgggcgagttttcgcctcttctctcccatggactgagagattggcgtattcggctcgccgtgagcagcgaggctgtgccgccctgaggcactccgaggtaatgagcgctggctgcgagattggaaaagacccggagaaccgttcggcccgctggtcggtgttgatagggcacttcttgcgtccgtgtcacagaaagattcccagttacgtggatcgcgagagcgaccgaaagcacgatctttctcggtcacacctgcccgcggcgtggctgggaagacggcactgctgctacgttgcaggcttgtcatctttgttcggcgaactgagaacatcgccacacggttcttagacggtgatggttcgttctctccgcggattactgcctttccatccgatgacatcgcgatacgtaaggcgttgcggcccttgggcggagacggcgttagctcgtcctctttgtgtaccaaagcctctccatcaaacgacatcgacaaacgcagcgatgggggtgacttggtaggtgtggtttgtgtgttttgtgtgttttgtgtgggttgtgtggttgctgcctgctcattttctccctcgcctcggatatccgacactgaacgtttcctcttcggtatctgcagaagagggtcttctgagggatcattcaccagttgggaaaactcttcctgtgtggtgggcggagtttctccagcagcctctgttgccacgcttgtctgagtgctctggggcagctcatgttcatctttatcttcagtcactggatccgaatcgtctgaaaactgcaacagtcccccgtgccatggttttgatgccatttcctcgcggtggtcgttgatgtcaaattgctctgccccacttgaagatcccggctccgtcgacgcgttatcatcactcgaaggttgacctgatgaatcgaccctacccgagcgcggggcgagtaattcgtgaggttggaggggtttggatttccgacggtcgttctggcggcgattttggaaccaaatctgtgagccagttagaagttgtttttgtgtgtgaactcttggcatcacatacttggacctctttctcgccgagtgagacgcggctcacgatactcgtgcgggctgccttgtctggtttgggattttgctggtattcggattcaaggattgcgtgatcctccggactgcaaaatagttcacaatcgggttaattgacgcgttcatagtatggacagttatgatagcgtacctagttcgacgtcgcttctggcgggctagcagtttattgtcgacacgaggagggaggttctgtgtgagggttttttgcgaatgaacgagaaaagcgtagttaagaggattggagtcggtggccgggagagagggcgaagatgagatcgccaccgaaggctccgggtcagacatgatacctaagagagcatggaggggttgggaggataaagagaaagaagcaagaacacccaatcacccaatcacccgatcaaataaataaaaaacgaggcactgaagatggaaaagccgtgaggctggtatgcagaaaaaggtatcaaatcgcgtcgcggtgtggacgcggagtagaaagaacgtggcccgcgctagtagcaaagtgctcctccgaggtacttggtacttggagacacggatctctccctgattcgatttgatcctgatcctttcaagtctaaatttcctatctctctgactcctcggaatgttcaatttgcattttgtctacatttgacgcgttgggctgtagtggtttaggcccacacttggactaaactatacagtctgtgtgaagcgcaaagcgtgtcctcgcgtttgatacaggcatatttgaaatcctccagagtgctccgattaaacaaccgagggttaaaccattccattggccttgattgccttatttgccttctttcgcctgatctgcccgtgagcgcccaacgcgtggtaacgcgccctcacgtgaccccacgaggaagacttgcacgtggtggaatgtgatctctccgatgattttgggaaacgtggaatgtcaatatgtttggaatatgtttagaaaagagatcccatctcttgtgttcgtagatgcacgacgagagggcatttatggctcccaattgtaacacccttagtgcatagtgggtcaccggtgaggtccccatctaagaaaagcaaagagcttcaaatgttggtctacagccaatagcctaatagcctgcttagcaggagttgccgactggaattctcggatctgagtgtaagccagtttggggacaatcacttcttctatggcattggtcgtgtttttcttatatattcggtctcctagttaactatgttgtacaacatacaagattgactaagtatagaccgcttcaaccaccaattcgccatccaattaggagcattcctatgtctgatcggcatgcaatcttatgaatagtcggagcccctaaatagtcacatcaggctgcacccgatatatgctggctatgtcatcggtctgttgtccatgtcccactctaataagccgagtgtgcagaccaagaccagaagtgttgatttgctcattggttgacgcacgctaagcaagccaagggaagaagcgagaataccgcgtatgcatgacatcaactagaaatgcaactgctagacagggagagagtatatatttgaatgtgcaggtctgctaataagcacatacattaaagctaaacgaatgcgacttctgagaaactctattgcttcgaccaaagcctagtatacaagtacatgtttcacatagctatctgaccatgtaaggtactctttttatatgtccttctcactggtcatcttgtgttcactatataccatcacagccatacgatgcctatctagtagaccagtatatccctttcgctctgtcatcatctaatcatggggactttctcactaacttggcaatcgacgtacggactgggctgtaactactgtctagtgtttattgaccttacattctgctcgctcatagtatccatgattctaattaggttagatctagacccgaatagtcccggggtaaaataaagtaggagtctagaataccagaaaagagtcaatactccagctagaatcttcgaagaatgtgtccatcacattaatacaacccttgcaatgataaagtagggagtaggacagtagaggctagtcgtcttggctgtaaatcagtgttactagcattattcccagaccaatctcgaaagaatagcataccaatattaggcaaataccaagtaataagaaggcatctggttatattccaagtatctcgatgaaccccatgatcaccaaaaggacaatccagccgatcaacattccgcccccgggctatcccttccatctcccagtgttgattggttcgatacaaagctgctcaatgcctaaataagacaatcaggccaagaggaaaacaaccgcccatcgtacgataatccacgtcttttccccgctttgacgcttggacatgggatagcatccccagatcaatgcatcttccctgtcattactgcaactcttactttggcctcttttttggattttgaggtccttttctacctctggactcatttcttcgtatcctgactggtgtcggctctttgtttctttttctttaagaaatatagtgctataacaccatcagactctctggcccggcacggcgaccgggctgtgacacccacttttagcttgtgatcactggcacttcggaaccaaagctttttgaatccaatcttctatttcgcttccgaccttggtcactatcacacccatctcatcgacccgactctgaccgttcgtgcaacaaagaatcttgaactcggagagatggctgaagacgcgaaactgaagaagaaccatatggcgatagtcttgggcatcggacttggagtggtgctgcttatcgcacttagtttgatgtgagttagattcgatttttgcatcttagtgtatgctatctcttgtgtctcctccgtcctttccccattctcaccgatacatttcctccgtcggttgtgacttgttacataaaccatgccactccattccacgctaaccgtgtcattcagtctgacaatactcatcaaccgccgggacaggcagtcattcttgagatcaaggaaaaatcctactgagcggttgcgcaagttggacaaagtctcgccaacttgtaccctcgagaagtggtgggcgaccacgaaggggaatctcggactgtctgaggccgtcgatggacagttcgtttggtatgtctaccttgctttgccggtagaacagtcgctgacattctgttcagcgccgtttgtttggagcaggtagaccgcacgcaggagatccgcgacctgcggtgcttgcacgtttttcaccgggaatgcctggagaagtggttcttgggtgaccatttcaattgcccgctgtgtcatcgcgcatactatgtggcagacacacctccccgcacagattatctgtggatggtatgaccagataccagccaatgattggaagggagggagaatacaataacgatgtgatgaataaatctttgcctctaaatcatctccacaataattcaatgaccaaggtttatggcgcaaggccctcggtaaggggcatatagtccggattgaagtcccagatcgtattgtagtttgaccaattgaggaagttgtcgaggccggttgtcacatcgtccaccacatgctgctgcacaggctctggatcgagtagctgatcaaggatgcgagacagctttttctcggcttgtttgcaggtatgatagttgccgtgaccagggcctgcgacccacgataggaaagaaataaacacgctgaggttgcggatcagctcagcacgtgggagaggaacagcgtgtggaccggactcatgcgattggcgcaggagttcaaggagaaggacgctggcggaaggaacaccgtacgtgaggacctgaatttattagtagatgtctatgaatggcaaaaatggatgacatacgatccaagaaaaatgccggtctagatcgaccattggggttcggaacgaattaatctgaatgacaatagctagcacccgacgagatacatcgcaaagatccgcctgtccggtgtttgtgtttttgacgactgcacgatagagtaagaatgaagtgtatagataatccaaatagaaatagacaatggtaagccacccatcatggaaatggtcgttcgatcgccggtcatatcgaagctgatccggagatgactgccatatggcgcgagatttctcttggatttctctgtcataaagtcagcactaggaaaacacgtaaattggaaaagacatactcggatttctgaattaaatcgtgttgctcgcgagtccccagtacaacctcaagagtttcctcccgaatgatagctagctgatagcgtaggcgagttggggttactaggtgtaacctcccttgactgttccatccggcgctgtttagctccgaaatagcattgctgaggacatctccgcctgcaaccaggacttcgtcgcttagatccaatggagcatcgagtgtgcagaatcggccattcatcagtggcggccgcccaacaaatgttggtatcatcttgtccatgtagaaggaagcaacgaagcagcgcctccgccactggcgaagaaagaatgggcaattctcaatgcaattagtctctaagtgtagcccagctgcataaatcgtggataccaggtcacctaatcgacgccatgcttgatagcctaacagcggtcagtaaatcgataggacatgagatcctacagaaaggtaaagccttactggaatcaccatattgttgtgttcgcaacatagcatcattgaattgcaacattgccagcaattcgtttgcagacgatgtctggtcacagaaaccaaggcataccgtacttatcacagtcacctgctctagtaaccggtctttcgctcgaggctcatccgagccccgcgtaatgtcagggtcattgtctggcgtaatggccaattgcattccgcaaagagcgaagatagacccgagtgcctcccagcggaggttgcgaccggtaaaagaggaacagtactcctcgactgacatagacttgtgagtccgcatcgaacgggaggtattttgaaatatttgattcgccaaatcttgtagttgtgccgtcggatcactggagaacccgtcaaatatatcgcgcactgaacgcagaagttcgtctattacgatcttaggcacgacggtgttgttccatgtccgaccatagaaccgagcaatcagcatatcacacacagtgagattatacaaaaaccgcagtacatcaaccccggattgaagtcgatcgggttccactatcaaccccgcagaggaatctgtgctctcttcgggctcgaacgaaatctcactgcgatgctcagtcaaaaccgcagagtagcttgtcgatcccagatatccaggaagagctgcgggtggctccaatggcgtgaagaagcgcccattacccagtgagcccgagcctgggctagaagcactgtttctacatattagtatgggcctatcatccgttgcaggagatgcttactttgaagttggttgactggtcagtcgactagaaactatcgcaggattgactgaatcggaaggtctccgtctagtcatcggggctggatgataaaagcatttgtcgctgattctttttgcggtgcatcggcgacaaaccggccggtcatggtcacatcgctgtttggatctccgacagggttcacacgactgcaaggtgccgtttttgcgcgttgcgggcgatgcagagcgccgatcgtcgtttctcatggctcgagaaacaacgcatagaggtatatatgatcgatgaaagaaagacctcgggaaatatgatacccgcgatgtttgcctcgtccaaattaggtttagcgtgccacatctaggaggtcaaagtataagaaacgagaaggtcagtacaattcaatatggaagcttgcagatatatatatttttattggggctgcatgtttcgcggagggttatattaatcactggaactggaacccttcttggcacgatataggaccttcactgacggcctgcaagttccttcctcaaaaaatcgtctattatctatatgtcccaaggctttctgttttcctcgttcgtagactggagatgataagttacttgactgagacgtcgaactgtacaatcagacttatcctaactttcacttgagcccattatgcttcaaagctataaatgagtattggaagtagaaaagtcgaagagtttcaatattaagacttgctgaagattcataagctgaagtaactacctatgagttatctagataaaatctaaccaatctaaccaatctaatccccggtcaaccacttatgcagcgtggaggtaaatcttcttgtttcgatataagacatgagtcaacaatagccccaatctcggaattgtcggcaggccaatttccgctcaagagttgaaaatactcgaagtacatgtttattctgctttcggcacatgctgctcagccccatctgttgacaacggcttagtttccttctctagctccgagcccacagatgattgaacgtcatctgtggctagctggtggtcgagccgagctttttcctcatctgtggcgccggtgaggtcaaaagcaacctcctcgccgaaatttttggcgatttcctctagggtgagaccagcagtctcggggaagaagaagtagatgactgcagtttttgttagcgaaattttagttgacgggtcgatttgatattattgggaacacataccgggaatgaagaatgcagaccagcaaataatgacaagataatatttccagccgacattcccgaagcccatgggggcagtttgcaggaggatgagggtggctaagtatgtcagttagaatttggaggcgaaattgtaacgaaatacttaccagcaaattgaccgaagagagaaaagcccatgccaattggtcggatttcagtcgggaagatctcggagacatagaggtacatggtggtatcacagaaagtactgcaggaatgtcagctcgatatattcagcggacttgatatgttgaagtttgactcacccctggaaggccagataaaggtacatgaagaatataccaaatccatttccgaccttgtttgttgtaccagcatactgggcggtcatagcagccagacaggatgtagatacgataatgccgacaaagccagtcatgtacatgccgcgccgggagttaattttatcatggagccaggcgcccagaggattgtagatgacacctgaactaggttagctaacggtgtacacagtagaccctggatgtttatgctcaccagctgttgtcagccagacagcactcaagagcaggggcatgccaccctccatgcccaagtttttgtatagaagaacagcgtaattgttctggccgttgtcagtcggatatacttctctgtcggatattaccacacttacgatgatcaaaggcccgccaaattcagcgccccattgggcaaggaaaccgatagccattcgctttcggtatgttctccttgtgaagacagctttccacacgctgccgtaagtagctaatctctcagcctcgagtcggatttgctcttttgtctggaagaactcttccttggcagccaagttattcgggtcatctggtgattcacggagccgttcgagaacgtgctgcgcctcatcgagcttacccttcgaaatcaaccaacgaggtgaacgggggagccaaggagatcccagaagcagcaccaacgcgggcagacattgcaaggcgagagggaatctccagccaaacccagacagggggcctgttgcatagtagcaggcataccccacccatcccgaaagcatgtatccgaagaccaagaaaatggcgtggtggccgacaagccagccacggcgcagagcactcgacatctcggaaagatacatagggcagacggttacgaggataccgattccaagaccacaaatgaagcgaccagcttggaacatactaaatcttgtcagcgccagtctaaccctcgagcaggagaagcgacatacgctagtgaattcgagccggcttgaagtgctcctccaaatagagaaaagaaggcaccgaactggatgtttgcctttcggccaaagaaatcacacgaccacattataaaaagtgtaccaacagcaccaccagcactgaaaacaccatttgctgtcgagatcgcgggggtagtgattgtcgcgtatcccggttcaccctcggcgggcaggctgaagtaggcataccatcccggctggccgattgtactggagataatcgaagagcaatatccatatgtctatttgtgtcagtttagtgaatagcagagacttgaacatatctgcgagctcaccattgacccaacagccacaaaaacaataaccagcctgttataggaactggtctgagacccgaacctacccatgatagaatgttgtagtccttacaaatttcaaagaatcaagggtgtataatgaaggatatcagcatcaggtttgaatggggagaaatttcagcatgtttgtagccgacaataagtaggggggccccgttggggtgctctgtgtatggcccaccgagagttgcataaagttcgcaagaaatacaagtggcttgccgatcacggcacaaagacttttgagcctagaccctgaaattgcgtatggtcaacataccaagttaagcaacgctcgtttgtcgagtgaagttcgtttccagcatgctataccaagtacagagtacgatgtacatacatacaccctgtgagagtagtatgttgtacagaatactccgcgggggtccaattgcggagccattagagtgcggatcccgttccgaggctattgagaccttacatctccacaacggaggtgctccgtacgatgtcagggaaaagatccttgcggtccgtgctagtgtcatgcacgaagttccatttagaaaaagaacacgacatcccgggctctataaagtatactttttgttcccaactttgaatcgcagaaaccacaatagaacagcagaacagcagaacaatggcccgatctccatttgacaccccgtttgatcaactcccgaatccaaagcaggtttggctaggaaagccaggtagctatgaagagggtctagggaaattagccatccttacccctgaagtcgtcgccgcggcttccgctagcgagataagatgtggtcgacgcgtcacaatgggatgggaaatgacgaagttggattatcctaatctcaaccgtcagccatgtcaccatcagattgtgcctcttctgggaggtgtggcattcgatgacatctatactatgaacccacgtgagttgagagtgattctgcttttctcccttcattatattgactgtttgacagagcaaagtagccagtgggacggtctgcgccatttttcccagacagtacctggtcagtctgaacgtctattctacggtggaacgactagtgaggaaatcaatgatcgccaaaatgatcgaattggtcttcagcattgggctaaagagggtattgcaggtacgcatccccttcacatgaatacacgactcccctgatatgaactcacacaattgcaataggacgtggagtcttgatcgactacgccacatgggccgagaaaaaggggattaagtacaccacattctcgacccaccaagtgcgctttgccgatatccttgaaattgccaaggagaataagatcacgtttcaaaggggtgatattctgttcgtccgtgtaggagtgaccaaggagtgggacacgtccatgacagacgcccaaaaacaagcttactcggacaaccccagcccggagcatgctggggttgaagcgaccacagaggtccttcgctggctgtgggacactggattcgccgccatcgccagtgatgcaatcagttgggaggtgagcgataagaaagatagaccacaaattcccctcgatatgtggcaagccgatcaagaaactcaactgacagatccacaggtctacccaccacaatcccctgacatattcctccatgaatatgtgcttgctggatggggaatgccgatcggtaagtcgccgggacgttttacccgagttccgcaggtccattatgtatattgactcataaccaacaggggaactattcgatcttgaggcgctagcacggacctgccaggaactccaacggtggagctttttcgtggcatctgtacctttgaacatgcccggtggggtttcctcgcctccgaatgtgatggctattttctaggtccaacttgtctgcggagtacgatgtatatgtacaatatatggagtggtttgtcacatagtcaatcaagcatccggtagtcattgcgggtacctgggtaggattccctatataaaccctattgactggccggctcgtgtggtaccgcaccgttggaagtgtcaaaatttcatgctcgctcagagtgtacaaagtacgagggcaactcgggcgcgatcaaccgtcatggaaacgttgtacattatgttctagactgttcgccgaaggctcgaggccgaacggaccagcggaaaaggatctacgatggacacatcgacacggcaacaaaataatgatacgcggtagagtttcctaatagagataaaatagagagcacaacgtacggagtagtccgtacactttttgcctcgtatttttgatttccgttttcttttgggggccagggtaacttatccaaatctccaccatctgtagcggacggaccctgcgatccacaacctatacaggttccactttaattgacgaacctgcgtcttcaaaacatgccgtcgtgggtcaaaagtgacctctggaaatcatgctgtgcgcaaccacggttgatggagccgttcgggcccacttcccgtatagactaactcaattgcaagcccagaaattgtaattacaacgtgaatgccaatatgatcaagagactatgcaagcgtttgtatgcatatacatatgtattgcttgtgctgagctgctacaagcattttattggcttgatctgggcagttcatgccaggaatatatgtatgtaggtcgagttccaggtcatgtacaattacgatttgtcatttaaatgacagcatgaaagcttgaatgcacgtaaccgtgtatttgtgtgcaccgtgcaccagggtgtacatactacacactgtaggtacaatgtatccaacgtatgatcgtagtgccaaagcaagacagcagaaaaaaaaaacattttattatttacagaccttaggcatgaataagtgatcaatcctgttgtatttgtgagtagataatagagttctgctggttcttctgtttgaaacgagccgatcataggtgatcaatagcccgatttcaacaatgcagcttcgtaaaagcatgtcagtttaaaatttcaatcagggatgtctgaaccctattttctggcccttctattttctagcttcttggctgatattgcttaaaagatggggatgtcttgcgcctggccccgttactggttctaaacttacagcaatccgtgatgtcccccatgccgttgctggaacgaggctctgacaatgcgtccattgatcggagtgtgcagaactggaactacgcctgccagtcattatgtatcattggcatgatggtcttcttcggtctgcgtgtttatactcggttgttcattctcagtggattcgggaagcaggattgtgagtgaaatttttggatggaagcgtacggaacaggtaaatgctgacagcctcaatagggatatgcacagctgcctgggtaagactcctacatacatggaaagagggcaacttaggctaacagaatatctcgaacagttcctcggcatctgttactcaatcattgcactcctcagtatgtctctagtaccacaggtgacaggctatatctaacgcaaggacagtgggtcattacggaggaggcttacactggacggatgtccccgaggagaacaagattcctttccaaaaggtatacaaagcacacgaatgatgattatccagacttctgactctctagactatatacgcaacaatggtcatgtatggaccaacagcctatctcacaaaattgtgtctcctctggatcatgattcgtgtattcagtcccttccggaaatgtgtcatgtttattaaggtctttatgggaatcatgctggcctactacatcccggctgtcagcgtcaaaatccgaatctgcaaccccatcgccaaattctgggaccagagtattgacggcacatgtttcgaccaaacatcgatcattttggctgatgtcgtcgtcagtgtggtcagtgatttgatcattctcatcttgccattaccattaactttgactctgcaaatttctacaaagagaaagatgcgggttatgggtattttgggagcgggcggcctggctgttgcagccagtatcatccggttggcacttattgtcgttaccggacagtcgaaggatctttctcgtacgtttatgagaatcaatatgctagggtacgttttctcagcctatctttttgacgatgcattctaactgcgaaattcttttcagtaatgcggaagtctccatcggcgttatctgtacctgtctcccttctctctcggctctcataattcgaatctaccacgaatattccagcaacaaagtaacgctcgagtccgactacaaaatgagcgcgatacgaaaccggggtacaatggatcgaagcaagaatcaaatgagtgctgtaacgacaggctcggacgaggaggtactcatgcacaatgcacaggcaaatccgaagttcgagacaatcatccacggcaatagtgagaaaggaggtccgccgaaatcgacattcagtggcataggagtgacccgatctgttgatgtgtcaacctccgtggagcctcggtgattctgagtgatacaaagaacgatgtcaatctcgttttagacgataaaccctgcaaactatgacgctgggtcgatacatcctttatatatttaatgatatatctcattttcctttgtgattaatatacggttcttgctgggaagaagccgagtcctgcattatgcctttcgccgtcggtccgatgcagatccaatcaaagagcccagaatcaactaggggactggcctagatatgcagactgccgtaaggagtagaataattcgaactcgttgaccggcatggtccagaaccccctgaattcacctgtcccatatcccatcagtgatagccccctctgattctatggcatcaatatcacaggtccttgcactacattcatatatatctatacatctttcctgttagttaggtatctatagaacaagaacactatgacaggtactacacgggctttgggaatactgcatacgtacctttgcttatgtcggtacccgtggacatatagaaccctcaatgtcctcaattgtataagaaagagataacagatgtacaaaccatggctagaatttctctttaaacatacatttcacttcattcgaagctatttcacgcaatgtaatgatacctctgggagtcttcttgagacatggattaattgcaccacgtcatgactccagtctccaccctcaaacatctagatatttattttgtacacaatcaatccttctgctcatctctccattagatgtatatactcaaaatgcctccctccgtgtctttctctcatcttccagtcgaagtcatctacttaattgttgatctcctcgacccagcacgttacctcaactcgttggcgcagacatgttcgcggctatatctgctcttgaccccaatgctctatcaaaacagcactcgttcatcacacgggttccccattgtatgggcagcacagcatagctccgaagggaccattcgccaagcatttgacgccggagcttccacatattcatgtcattacaactttcaacaatcgcttgtcgcggcagtgaacaacaaccatgagaccatcgtccgactgatactggaacaaaatcaagaccctagtatattcacagaaaagcagagctgcaagctgtgcaaaggccagaaatccgaggccgccgcctcaaaagttctcaatccactatatgcggcggcagtgcgtggcaacgtggccattgtcaggctcctgcttgcctataagatcactttcgaacatggttgcggagaacgtactccgatatgctccgatatcgtatttgcggcagtaaacagcggacacctagccgttatgcaagttctcatcgaggctggctacgcctgggacgacaaaagaagaagataccaggataagacaccactcactgttgcagtcgatcagggtgatgcaagaatggttgaatacttgctggacaaaggggccaaaccctcgcgtgatgataagccacttcttgagtctgccgcggaaaatggacaccttgaaacggtcaaattgctcctggaacgcggagcagagcctcaaggaagcgctctttcctgcgcggctggcaatggccatgtggaggtcgtggaagtgctcttagaccatggggcggatcccgatcctgatatggttcgagattgtctgattacactctactatgtagctgtaagtggtcagctacaaatccttgatcttctgttggcacgtggggtgaacatataccccaaggacccaaagaaaaaacgctacttgttatcatccataatcgaagatgaactctggcgatcagttgagaggcagaagcggtctgctttcgctgtttcctttcgagccctcgccgattttgagaacatgatagaccacggagatgacctagcacaagccgagattctgtacatagctattggctatgggtgggatgatattgtgcagcgtgttctggagcagagcttttccgcagatggaatatatcagcactgtaagctccggtataacaggcctatactccaagccattcagaacggtgatattggaattaccagactcttggttgagcatggtgccaatatacaggagtaccagggagaaagcaaggatgaaggcgcgctatccttggcaatccaattgggcaatgtaaaaattgcagagcttttgatcgaccacggggctgatgtaaattgcataagcagccgcggagaaactgctttggcagaggcgacggcattggcgtccgaagacatatttcgcatgttgcttgatcgaggagctgatcctaaaatacctttactatccggtcgccaatctttgatagtgactgcaccatattctccagccactgacagtagaattaatgctacagccattcttgatatgctcttagcccatggtgctgatatcgatgaacggcggcttcctagcattacacccttatatcgggtcatcttggatgtcaactccggaaatcagcaggtgcgactcttgctggagagaggcgcagatcccttcgcggtgcatgcttgctatcgcgcactcgttacagaggcaagcgatgacaatttcaactcaatactcagggtcaaacggtcaatgcctagtcccgatacctggcgtcccaaaaaaacgtttatatttgtgccgaatatgagcgaactgaaagatgacccattccttgcatgcatgagacggggcgataaagcgatgcttgaggccatgcttgacgcgattgatcggaaaggacttcccttggaggagttgaaggatagacttgatcgagctcggatggaagcgactgagagtgggaacctgcaccttctacccattctgcaggattattactgggtaaaaaatatccacgcaagtagctgaagatttcaaaatgacaggatgttatttgctaataaattggcttgaatgatgctgtaaacacccgctcaaaggtatattggaagaagtgctctatgcgcaatgggaaacaggcacggtcaaaatcaagagatcttcaagagatcttttcgatcctcttccttgcaatatccatcttggatttcaatctagacacctcgttagtaaagcagatcaaatcaagtggaaaacgtgagcaaaggacatagatgtaaacgaacatatcagactcctcatccgccaacctcagcagatcattctgcacctcgagctcctcattaatctgcgtgccgagttccctctgtcgaataatgatctttctcaactcatccacattatcatcctggctctgcataatctgcctctgcaactgcagcacaccatcgttgtcaagttctcgagttcgctccgtctctttgccaaggaccctacccgcccgagccggcgtcctacgcccactagacgcatctccagcggcattcccagcattcatcaaagctcctttatcttgaatggatgcgacagtatgatcaagccggctcttcgttgccatagcatgcaagagatcctccaagccgtctttttccttgcgcgcattgatgagcaggtcttttcgtcggcgtatctcgcccccaccaagactggacgatgtttgtgcctcggacatcttatctccgcgtccaagatgcttcagtccatcgtccagagtggtgatcatggtccctgcacggacaagactgcccttcgcctgtgcagagctctcatgttgcttctgtggcgttgtttcctggtctctgcgagatagctgtagtcgtgcatcgtggaggtggttcttcatgtcgcggtagtagtcgagccatagcgtcgggtccgtaatggatgcatttgtagcggctgggtctgtgatagcggtgtggagtcgggtggaggtggtggttgagccgttgcccgttgatgcgattgcggtgggaagattgaggaatgcacgccatgcgggcgaggtgcgccagcgcccatcgtcggactcgttaatcgcgcgaaggtatgcctctagcccgcggcgacggtcttcgcacaatcgttcattcgagacggttttcgaaaaccaggttttcgaaggcagaggagctggtggaggggcattcgtttgggagatgagggtgctatggaaggtcgagaagtccgagtagcgtttgggaaccgtgaaggagcggagtgggaggcggagggtgatgtggtagacggtgtacggtggggaagtatttgagagggtagtattcggaatcgctatctcaacggttggcgccattttgattagaattggaatgaaaatgtcattgttctcaaaagtcggggtgtgagatagaatggatgtcgagcttggagtccgggcggtcataaggatgacctcctcttactccattgccacctgattcacagttgggtcggaatattcatacaagaatcttcagaccttccttggcttttaagaatagtcggccatgtttacagcctttttatcttaagaataacatgatcaagttaggttactggtggttagctgaaatccgccgaggcctagtatctcgtcgtcggttgaaattcgcaacgatcaggcactacgtatagaacacaaggcattggcacgttgtaacacgaaattaatattaagtaacattgggtatctcatacatgcaagtcaaatccatctattcccagatctctcgttcctccaaaagatcccgctggccaaagaactcaccaaccaccataatgatcatatcgagcacggcatgagtctgtatcgaccaatcgtcgtcttcttcttcttcatcccagctaccaggcgtctcgacagattcggaattggtctgcagggaatcgttctgcagcagccgagctcgcaagcgcgccttggctgcttccaagtcggattcttcaagcgataatgcgtcagtctccggcaatttcgcttgcttacttcccgcttcatttggaactggaggctcacgctgagccttttccttgttctcctcgccttgaaatgtaggttccggttgagtttcctgcttggtcgcttcctcattctggactgtagatctctgctgagcttctgccttggtatctttctcatcctcgacgagatcaccctgttgggttttgtcctttgctgggcctgccacagaataatcggcctcctcctcataatcctcgttctctaactcttgcaccttgcgcaagatagtcgcagctcgtttgcccagatttcgaataacacccacctctcgggtggaaagttgtccaacctcacggcaccttcccaataggccccaagcccaagccccaatgcgccgtacgcgctgagtgtcgtcgccgcgcacaacatcagacatcatccgtgctagtatttccagtacttctaacacgctgtccatgtccatgcttgccagttggaccatacgtggttcgactgtgaccaagagccggcgccatgttttgtgcgcagatccggcctttcggggcagactgatagggtggtcattgtcgagggtattgatagcactggcaggtggactgcattttagggtcgatcgcaagaggaggaatcgatgtcgcagaagattgttgtaggaattttgcgcttcaggatagagctcatcgagctttgaaggggaatttgcggcgttgtttgtgttctcctccacaggcgcaatgtaggcttcgtcctcgtaaaagcctggtagtagatgagggtcattcggttcaactagcgtcaaatctggttgcatatttgatgctacttttgaagggtctgtggtcggagtaggtgcagagaaaagtatcggtagtgagtttgcttcgaatctatcgagcaaaaattagttcaaacttgaatcacgacggacaagcctcgacatcattcaggcaaagcaaaagctatatagatgcaggatcaggcataccgaaccacgcgcaagtattccaatccatcgtccgggtcgttggagagtaggtcatcgcctccatcgtccaaccccgggaatgcgttcttctggccataaaggggattatgacggggatgctcataagatgccaccgaagcttcgtcgtgttcatcattttcataagttatccgaggacgtttcaacgaaggggccgacatggtgtcttttctcttgtcgggcagagtgaggtgaagatggtaggtcctgtaggatcgaaggagcttgggccaatctgcagaccggcttgaagctcttgtaacgaatatagacttgaccacctatttcctgaataagataagagactcatacgataatgaatttgtattcggcagttcctgacaatatttccagctttattctgctcattatcttactgctatcataatcctagtgaaatttgtatacaaccgagcccaaggcggtgtacaataattgcttatcgaaggcggggacctggatctgccggtaaaaaagataaggatcgtcatcggactatcttcacatctccaattatttgtgtctcaatccaccccatgtcttttttatctttccttggaactttttcccttctacttccatgctaaatcaattaataatcccacttcacttgagatgacctgtgtctttgcttctctcggaagcggttcggtctctctgttgcctcttcctcgccatcttcatccttaattgttacgaaacgccacacataatattttcgacacacggattcttcacgatatcaatttgaaaccttcttgtttgttctacttgtaaaatgctaaggcgggtcgactccatcgaagtcatgacttctccccaatgtgtttacctccctacagaggtcttaatacacatagccaaattcatttttgatggttggaaaaataatgccgaccccccaagttatcaagtcacgcttcaaaggttttgttcggtctctcgccagtggtactctgctggcatcgaatttctctactaccgacctcaacttgacgaaggaaatagcttcttgcttttcaccaacactgtgtgcccatcgattcgctcccgaggacgaagaaaagtagacttgggttcgctagttcatgtcctgaacctcggatcattggtccaccacagctcgaatagcctaacggcacggcttctaggtcgagtgaagaagaacctgaggacttttgttgctccgaggatctctttttcgtaagtaaataatggctatcacaacataatatccaacctcaagctaattcctctccacaggatcaacagccttgcacccttagcaaaatgcaaggagctctgctatctttctctccacttagtagctgagccaatcgcgcttcctgcgatcaagaaagccatcagcaatatcgacaaattgcaatcccttgagctttcatctacaactctcatcacagacgatagttccactgaagattggccgcccaatctaagatacctccaggttggcgggcaatttgttacagatagaatgtattcgttcaaatggcctcccaacttggtatcgttgacattatgtggttgtgatagtctaaacactcccatcttggaagatatcctcatcaatgagcagctccgtaccacacttacgcagttgatcattcacagtgccaatagcgagatgttcaaggagggaccatctgggatcttacgcgcactcatggctttagagtctcttcgaatacccattgatctgctttacgaatttctcattcttcctgcattcgactcaagggattctccattgtcaattcgtggactggagctcacggcaccatataacgagaacttttctacagtcattgatcccgatgatatttgcaaggccctgaaaatgaatctctctcgattgtgcgctcttggtatcagcgctagctgtcttggaataatacccgaagcatcacatgccaaaatcgacaagtggttgtggaagaatattgataagtgtcctgaggaagagcttgattctctttttgacttgggtctctatgtcatggctgagccaatgtgctaaagattcattcatacattcttatgaagtcttatatatatatgcctctctctgtatattagccgttgatgggtcatgctactgccccggcagctatctttctagcaatgtacaatagcacaacctataaaacagattgaagcgagagtactagttggacttgagaggatacatttcaaggagaataatgatgcaccgacagcgaaaatgctggctaatctgtgattgtttggttattctccctatttgattcaaataccatggtccttttctctaaagcctcgaatcaaaagcgagtgtaaaagtttgagagtggggaaatggaagttcggagggaaagatctggccggcacggtcccgggggaacctggaaatgacgtacatttccttttgtacacatttcccaggatcacgaccacaatgagatcgcaaaccctttggcggtcatttggcctattgcagcgtcaatccctctctactcataaaactgtcacccgccgagctatccaaacagctagttctcgaccgatccctaacttcgcatttgcatttgagtgagtcttgaccggcgaacacaattcactcgattttcttctcacatgctacagcattgatggcgtcctcctccgcgcatcgaaacctttgcccggtgccgccgactcgcttgctctcctgaagaaacaaggaatcccctttcttctgctcaccaacggcggcggtaaacacgagacggagcgtgtcgcggaaatcagcgagaaactaggaataccactggatgctacggacattgtgcagagtcactcaccctttgctgagctggtcaagggaccggacgagtcgagcgccctggaacacaagtgtgtgttagtggccggaggcgatggggataactgccggcgcgtggcagaacggtatatcaaggaccccttcctattgctgaatgatatatgctaattaatagtaataggtacggcttcaagaatgttgtaactccggcggatattcttatggcaaaccccgctgtctgtccgttttcgatgaacttcagcgaatattataaaacatttgcccgaccgctcccgcaccccgttaatttcaatgatgcgtcgaagactttgaagatcgatgctgtctttgtgttcaatgatcctcgtgattgggcgttggacacccaggttattatggacctcctcctctcatcgcaaggccgtctaggcactttgtctgaaaagaacggacgaatcgatcttcccaatcatgggtaccagcaggatggccagccccatctatacttttctaatccagatttgtggtgggccgccgcctaccccttgccccgtcttggtcagggcggattccgggaagcgcttgagggcgtctgggctgcggctacaggtggccccagcaagggtattgagttgaagaagaccgtgatcggcaaaccttatcaacccacctaccagttcgcagagcgtcaattgcttcggaaccggctgagaacatttggaagctctgctgaaagcacgcccctggaaagagtatatatggtcggtgataatccagagtcagatatccgaggagccaactcctatcgcagtgaaattggcagtagctggcactcgatccttgtccgcactggggtataccgtggcggagagcctgcttggatccctgagacaattgctgacaatgtacaaaaaggtgttcaatgggcactgaagaactcgaactggcctgctgcgtgattatcaagggacgctggatactctacattgatatgaagatcggcatcaacatggcgccaatctatgtttatatgtgtttgttccaaatagctaccagcaccaatccacataattacctctgaagcattttttcaacctatcatgtaataaaaaaatgtagatacaactgattaacacgcatggatgtactccgtacatatacagtcaaggtagatctgcctaagtctccacaccgcctacccctcttagggcttgatcattcggcggggtgagtcgacgaaacagttttctccgcagctctacttacaatcagcctgctgcattaactcctgcaaatttctcaggatagaaaatcattaacgtaggatccaacatacctgacctaacactttgctccctctaattgtctttgcagcaccatggccgactccgaattgccccaccgtcccaagcccgaggcccaggatgcctccgctcccgccgcggaaggtgagaccaagaacgcaagcaagaacgcactgaagaaggccgcaaaggataaggccaaggcagagaaggctgcggcgcgtgcagcgcaagaaaaggcccaggccgccgcccaggaggccaacgacacggccaaggatctatacggccctctcccagaggccgagaacgccatcccgtctacacgattcagcgaactctcagaggaacactacgagaaggaggtgacagttgtggcgcgtgtggacaatgcacgtgtgcagagtgctaagcttgcattcttgatgctgcgccagcagggacaaaaagtgcaggccgtcattgcggccgcggagcccatctcgcgacagatgatcaagtacaccgggggcctgaacgtcaactcgattgtgcagatcaccggtattgtgaagaagcccgagattccgatctcgtctgcgtccattagccacctcgagatccacattcgcaaggtctatatgatctccgaggctgcgcagatgctccctatgcaagtcaaggatgctgagcgcccgcccccagagagcattgatgaaggtgctcaggttgatgccgagggtgctcccatcgtcaccctcaagactcgccttgataaccgggtcctcgatctgcagactgaaaccagccaggccatcacctggatttccagcggtgtctcccagctatttgctgagtacatgattaagagtggctcccggtggatctccacacctaagctggttggtgccgccacagaaggtggcagcggtgtcttcgaggtgaagtacttcaagcgcaatgcctacttggcgcagagcccccagctatacaagcagatgtgtatcgccggtgatatggagaacgtattcgagatcgcccccgtattccgtgctgaggacagcaacacccaccgccacttgactgaggtatgacctactgatatattttcccgaacaggaaaaaaagaaacagattattctgacatgacttacagttctccggtctcgatttcgagaagaccttccgcggccactaccacgaggttctggagttcgctgaagacctccttgtcttcatcctcacccagctcaaggagcgctacgcaacccagatcgccaccatccaaaagtcctaccccaaggccggcgacttcaagcttcccaaggacggtaaggcgctgcgcttgaactacatggacggtgttgcgctactgaaggaagccggtgtcgacgtctcagagcaagaacgcttcgagaacgacttctctaccgcgatggagaagcagctcggccaaatcatccgcgagaagtacgacaccgacttctacgtgctcgacaagttccccatggctgtccgtcccttctacaccaaggccgatcccgacgacaagcgcttctctaactcgtacgacttcttcatgcgtggcgaggagatcatgtctggtgcccagcgtatcaacgatatcaaggagttggaggagtctatgcgctctaagggtctcgagcctaaccaggagggcttcgaggattacctcaatgctttccgccagggttgcccccctcacgctggcggtggtcttggtctaaaccgtattgttatgttcttccttggcttgcctaacgtccgtttggcttcgctgttcccccgtgaccctcagcgtctgcgtccttgattttgcactgtgtggaattatctcatggcattacaagaagcatataaaaacaaaatcttttagctgtctttcaaacattcatacttttattttggtcgtaatatctgtggctaatttaaacaaacaattttgacccttgtctactcttaacttaaccaacggacaaggcagtgttaagaatcaagctcgcgattatacactaatgactgctacactgtgagaaacatcaagtgtatgcatgaatatgatatgatatttggatgaaaagttgcattgacaagttttgaggggtggacgacgcaatctaacgaaccaagacacatgaaaaagacacacgctcttgtccccccaaccaggattaagcacgtaacgacaaaaagaaagggagagaaagggattaagacacagaagcaatcacagcggcggcgacgccctcttcttctgcccgaacggtgatcttggtagtcacaccggccttgctggagtaggccatcttgatgagagcagcgacgcggccaccagagacggtcttgccgaacagcttgagagtgtgtgtgctgctgttgagggccacgtcggtaccctctagaggttgcagagatagcgctgagatcagttgttccgtggcatctgggatcaaaagcgtgagtatttataacatagagcaataaataggacttgtacataccgttgatacccttcatgttgctgagctgcagagtttcgctttcctcctcgccattggcgccagtctgctcccagacgtggtcgaagctgccggcgaatgtcgggatgacatagtcactgcctgtcagctcgaggtcctccacctggtactcgtcgtcgtagccactgtcctccggctcgccgcttacgggatcgatttctttgctagtgaacttgaggatgtttgtgaaggaggtaacggggacgctgttctcgccggtgagcttcttgaaagcaacgtagacaacaccaggctggtctgtgggcagcttgggggcaggaatgataaagtcttcctccaatacgtcctcttcttctggcgtggcaaccacggtgacattctcaagaatagtatccggaagcgtgttcttgatatcatattgtaccacgatgtgttccttgaaaatgtgcttgacggccgtaacaacgtattcggtttcgctctcggaaagctcgacaggcgcggaggacttgagcaaaataccgtaagccttgatatcggggtactgcagaagttgctctgcgtatttctgggtggcagaggcgctggctgcttcggccataccgccggctgccttgcccttcgggggaccggtcgaaggcgccttgagagtgggagtagctgaggtaagcttcttggtcctctcctcggccagcgcctgctcgtgtgagacaaccggaatggtggcaacatcgaaggcagtagcgaatgtccccttgtcaccagacgtcacatacatgacgagctggtgttcaaacgtggaaagggaatacattgagtctataaccattagtaaaattaccattgctagtcatggacaagaccttaccgttcttaatgaaggcgctcgccgactcatcgtcttcactcatcagacgcaggttaagcgcagcacggtctcgcacctcgtcgtcggtatcatcaagacaacgggtgaggagaacatggacactagacttgacttcggggtctttctgcccaacaccaaatttggccaatgcggtgacagcagcggcgcgtacgatggcgttctccaatacgacgcggttgtagatgtagcggatatactttgtaggatgggtagtcttagggccctcggaaccaagcaggtgcaggattctaaccgaaagcttggtgaactcgcaatcctcaatgaactcacagaggtgagcaagcgcatcttccttgctttccgggacaaactttatcaaatcgaacatgctctcaacaacagtgcgcttgaactcgtatccgccctcgtcccgcaggataccactcaggaaaacgagcataccggcctgcttgctagggaacttcaaacacaaagtgcgaatagcttcgacaatagtgaccttgaactcgtcggtgatatcagccataaagcccgagatttgcttcatcaaacggtcaacgctggcttcgttgccagtcttgagtagtgtcgtaatggcgaacgttgcgattgaacggttcgagttagagataagggactcgatatcagggttgcagacattgacgacgtgtggcttgaaagaggcgaagttgtgtaggatacggattgcagcgaacttggtgattgaccggggggaggacaggaagagctggagaacatgaactgcctgcgttgcctcggcatcggtgacatcgcgcatatcgcaaatagccttggccgcctcaaagttgaccatctcatgcttgtggcggagccagccatccaacatctgcatcatgggtttccggagaccttggtcctcctcggccaatttggccgccagacgtaccaacaaaaccagagcagccgggctcttcaccacacctgcagcgccgtactgttgtaccattttgaccaaagacatgcgatcgtgcgagcgcatctggtacaaaagaccgatggcgtggtactgtgtcatgaaattcgagttcgagatagcatggctctgtgagcctgagaaaccaaggaacccggtcgatgatttcgatgacgaggccgcttcctgtgtttcgctctgccacctccggacaacgtcgcgcgcaatggggaggagatggtaggaagagaccaaggccgcggaggacaccgagggggtcttgtcaacaatggcggtcttgataagtcgctcgataccctgtactgtggaacccttttgcaattgtcagcaaatcccctcaaccattgaagtcctcgcgaccgacgacctacatcgataatgcggcagagcgctctgatggcattggcccggtacaagacatcgcttcccaccgcagtgtccttcataatgatacttgtcgacatgatcacatcttcggcggtgccagctagctccttcaagatcaggtacaccatctgccgcaatgaagggtctttgttctggaagagcttggagattccgaagaagagagtggtggcttcattcgtagggaactgctccccggtgaacatgaggacagcgatcttggtgagtaacgttcggcatgttcgcggcgagataggagaggaattgaataggcgtgctaggagagttatctcgttagcattgaatatgtgcagcgcatgtaggcgccagggggtattgttcattacacaccatcttggaaaacggaggtccgatcaagcttgatcatgacctggtcctcatcttcgtttttcttcatgtaactcatattgcccagcagctggaattgcaccagcaatgagtggttgccgtcgtattagaaaggtggagttggtgcaattgggacacgggtcgagtacacagaagcagggtagggcggtgtaggtgactataacagttgcataaccacgcaggaattggaggcttaaagagggtaaatcggagaaacagacaaggatataatcggggtaaatgcggtggtagtgaatctcgaaccctcaaagctcagaagtgccagctattgacaagttgaaggtggccttccgtgtgtttggcccgaaccaaacactgcaaacaggtggcatcacgatccaaggcagcgcattcatcccctctaaaccccctcattccctttgtatttcgcttggatcgaatttaatctatacatctttgatcatttcaatccaatatgcaggttgaagttgaccctaaggaggataccgagtggtaagcatatttacttgcaatatacccccgctaccggcaaggtataacctgaaggcaatggctaacccgttgttgaatattgcataggaacgatatcctccgtcaacatggcattattcccgaaaagcccaaagaccccgaacctctgatccaagaggctctgatcgccgcacagcacagggcgcacgagaaccgactcgaggacaaggaccttgatgagctagacgcactggaggatgaggaagatgagacgtttctcgagacttaccggtaagctttgatgtaatagtaagtatacctaaaaaggttccctttgctcacggtaccaatcaaacaggcaaaagcgtctcgccgagctctccaccctccaacaaaccagcctgttcaaccaagtctacccacttcagaaagtcgattatgcccgcgaggtgacagaggcatccaacaatgctttcgtcttagtcaacctcacatcgatgggcgggaatgttgaatcgcgcgtgttgacggagctctggcggcagcttgctgccaaattcggcgatatcaagttttgtgagattcgtgccgacatgtgtattgaggggtatccagagaagaacacgcccacaatcctggtatataaggataccgagatcaagaagcagcttgtcacgctccagcagttgaagggaccccggaccaagatcgaaggtaagttacgttcaaggcaggagtgaaataagaattgtatactgatcaaatgcatagatattgagcgtttgctcgtggaaatcggtgctttgaaggagagtgatgtccggctgaggaagcgtgatggagaggacgactacaagaaagacgatgatctgaacgttgaagattatgatgatgattgggattgatttccttgcgattgaaaatactgcaaatgttatgatttggcttgtgtgtatgtatattatgaacatatccaaaaatgatgacccccgttctacgtcgacaggagccaagagaatgataccttgttagccccgattggaattacctacatgtgtagacagtttcttgccatataggctgggttgcatgatggcgactatctagtaaatgtggatactcgaaaccatgcgaactatgtctgtagccacccattgcaatggaggtaaagaagccaaaattcaagtatatagcccagacgctgataaacgcaaccgaatcacgtatatactgaattaacaacgaattggatgacaaaatcgctgttcatcccatcaattccaacgccaaagaacatcaatcataaccgtatcagcggtacccggagaaaaaggataccgcatcaaatcaactcatcacgaccagcagccgcactttcctcaatagcccggcgcacctggctctctttaaaagcagggccctgtccgtcacactgcgacatacccttcaaacgctccgtgacatcaccgatatcaagttggccgcgctcaaacagttcatgtttctgaataaggtcccacgtagcacccgcatccagcagcttctcaccggtaatcggacacacggtgagacggtggtgcaggtttcgagacgtgccagggctgtctgccataaacgtggtatggaagtctgttggggagtacttcattgggcccgtaaccgttggttcaggattctcgtttgcaccgacatgtccgcggttggcctgttgtgatgtcgcgcgcaagatctcattctcggttgtgtaccgggccagctcgcgcttgaggcgctcgttgtcggcttgtaatgtgttggaggcttgttcgaggctatttactttgtcttcgaggtcgcggacgtgctgttccttgcgctcccggaatgcccgctgactgtgtaacgagtggaacctgttagtgtttgctttacggggatagatgtctctagacacgtgggttggatatgtcacatacgctgctcggttttgtgccttgcgcttgctttgtgcgggcgctgagtccttttcctcgctgctactcctccctaaagctgggtcggcgaattgagtttcatcgccgtcgaatgaggtggggcgtgtgtgctgagtgttggcggcatcgctggaagcagagtgcttgaccgagtctggcggtgaatgcggtggcgggacaaaggaggggtcggcagggaatggggggatatagccagggaagttttggtaattattctggtctattagcgacaagttcttgacggttaggggggaacaaagaacctaccacaggggcgaatgtatctggttgggcatggggttggtcgggggtaggcagcccgtagagcgagaagcccgagggctgtggtcggggatcatagaaagagtaatccattacagaatcgtagacagattccaaggtctcgagggcttgtcggaaagttaggaggtgagggtgggaaaacttttgaggaaaatctattatctgctcgagtttcatgtaccgggggggcgttccgttgtacgatgtacagaattcaatgttgtcatgacactcctataccatctcgattcaaggtatacttccaaggtctacatgtaacctctcgaatgtccatcgattccaagagtgctcggtgcatgggccaaactttcgatgatctcatcgttttttactctttttggaccgggaagtacggatgttggggcgatggcggtctggttgcgagttgaatagcacaattccagttgagatgggagtaagcaaattgaaagtgcagtgtagagaaagctaagagaaataacttgacacaaatcgacgcataccaccccggaagcgaccctaaccaatgtccgtcgccaaccacaccagtttcctgcagagcgggattgccctggaagccttctgtaacggtaatttctgcaatgtagcttgagcagaaatccagaaagcctgcagagcaatgctcccgaaagctttctctgtcccgaaccccctcttggccatattggaggccacacctcgtccccgttgagcgtcgatagttcacaaattaatcatcgccagataaacgcaagaaaaaaagcaagggaggatcgagggcagagaagaaacatgatgagtaaagaaaggggggtaagcaatgattggcagcgcatccgaagatgcattcaaggatctccattaccagcgattaaacaatccgacaagaaaatttgcgggctgaggccgtcgtttgcatctcccttagtcttgccctgtggtcattctgaccgaagatgccaggttgtaaagagaaaccaaagggcgaagacgtaagaataagccacaatatcagaagcgtttcgagatgtgtaatcggttgtcccgcagaacgggtacaagaatccgaaaagacagaaaaatagtcgataaagttttcgcaggctcagcacaagattgtccacccaattggcaaagctttcatggggcatagagcaggcgataaacagaagcgaatcgaaacggctgagatcgaaatctgatcgaaaacgggataggagggctgtcggggagtgcagaatgaatagagatccaagaagaaaaaaacaaagaaatatccgagaaggctgagtgcgacatggtccgctctaaggcgacatgagggtccccggtttcttagtagataagaatgtgaacagacaggaggcacatatgacacatagcctcactgtcgtgtaaacactattagtaccagtgctcctccggtcctgcgtccggcttcgaacggccaccggagggtccataacccaaagcagcacctttcgaggcagaacgtagcctaacgccgaagactatgcgattagtcagattcagaacataagggtcctccacgccagcgtcacgaaatgcaaatcactcaacgtaggagataagaaagaaggggttccctactcggaaccaggtttcatgtactcacatcctgtcactacctcccacggcacggttggtgtccggagtgtcgagggcgccgcgttcgacgaccttacgacgctggctggagatggcaccgggcttggtggcaccactagctccaatctggccagtagcaggcagagcctggcggcgctgctgatcctcggcatccttatccttcttggaagcgtccacgatcatggcagcgttcttctggtacttgtagacggtccagtcgaagacgtaatcgtactggaaggactcgcggacgaagaggtcgcggaaaatcttgcgcaagtaggagtaatcgggcttgtcgtcaaagcgcagcgaacgggtgtagttcaggtaaatggcgaactcgttggggaaaccacggcagaggacctcggtaggggtggtcatcttcttttccatgatacggtcgtacttctgcttcttggtagcagccttcagaccttgccaggggagagaaccacggcagaagtagagcatgacataacccagagattccatgtcatcgcgtcgagactgctcgacaccgaggtgagtgttgatactggcataacgggcagttccagtaaggttcttgttctcacgatagggaatgtggaagtgagtcttggggtcacggtatttctttgcaagaccgaaatcaattacgttgacctgattgccacgcttaccgatacccattaggaagttgtcgggcttaatatcacggtggatgaaggacttggcgtggatgtattcgatgcgggaaatgagctgatcggcaagaagaagaacggtcttcagcgagaacttgcggttgcagaagttgaaaagatcctccaaactgggtcccagaagatcgatgaccatggcattgtaatcacattcggtaccgaaccaacgaacgaaggggataccgacaccaccggcgagcgacttgtagacacgggcttcatattcgagctgggggtgcttggccttgacgctctcgagcttgatagcaatctcctcaccggagatgatgttcgttcctagaaattatgagttgctatgaaggggtaaagcaatatctgttatatgcataccgagatagatatcaccgaaactgccactgccgatcttacggccaatgcggtacttgttaccgactcgcaaatcctggaggcaatgtcagtaaaactggtggtttggacatctcgttgacaatcagaaagtcatggtataatccgagcgtaattttctccagccactcgaggtatgactccgggtgaaaaagaaaggaaggaagaaatcgggtaacactgaccatggtcgtcatcttgaaccgatgggggcacagcgcttagccgtgaggaaggacttgaggctagaagattgagaattagtgttcaaatcctgttgacgaagtagaactgtatgcaaagctgatatcgatggagtatagaggggtgcaaaggaagtggagaggaagaaagaggtgtgaggcaaagaaacaaggaagtcaatgagaggggttgacacctaagcctcaggcaacttgagagggctgggccaggtcaacgaacacagcagaaacacaacacactttgtatatgatgcaatgaagtacatagggcaagggaatgtaacagaaaactgaaagtcaaaaaggcaaaaaggagaacgactcgatctaggcatacctgaagataacgggaccgaagctgtactgaggtcaagaataggagatgagccgggaaggtccggggggggggaatatcgagagaataaagaacaagggcaaagccttgaataaaacggagagatgatgctgagagccctgaagaaggagaagaaagaggagaggaggtgagtcggtgagaatttccttttggcggtttaatatgcaggggacggcagtcacgcccgaccgtggtatggtaagattggtattgggcatctatagacttttacgtacattttacagtcgccgtaggaattggtatagattcgtattaaatcatatcagatatcagaatgcatacagtcactatatctttcttgtcaaactccatactcacacaatccatggattacgtctcagctttggtgggtatgcaatccctcaactgaccggtaggtggtcaatgagacctgtgcggacaacaggcatcaagcctataaccatgcgctcatcatcggagtgatacccaatctaagatgtgtacgcttctcatttgaatcatatacaatcatattgctcctcgcgagacatgatatccgcagtggtcttgcttatgcatgatcatcaatcaacaataccagatatcatactccttagtatgcgcgattttcctcaatgggaaagtagtttcagtctattaaggggcaaacgtggagcgacctaactagttaggtatcacacccggttactaactattgccaacagtacagagagagtatgtacttctacatcgtagagtaaaaaaaggcattgctgcagagtaagtctgtacctatcgaatcgggctgatgacaggtcatcatttccaccctggtgttgtcgaatttacaacccttcaggttatccttatcataatgggtttggtgaaagataggagcctccacagggcaattaaagcgatttttcgactatggatgaacaaggaatccgcgtggaatatgctagtggtacagccagagtccaatgaacatcagaaaaccggggtataaaaaggacagccaggaggttgaagacaaaatcaaaactggaaagggaaagggcagataaatgagcgcaatggcgagacggaatcagaagataacaccgtgcatcgacgtagaggaacagagaagatgaaagcacacatcatacatagaaagagagtgggaaaacacaacggggaaaaaaagggaaagtattgcaaatacaggtgcagaacgctcagacggtgcaaatcacatatcttagggcacatggtcatagaacaataatggagagcatgatctctagatcacgttagagtgttcggggtgtgcagctccattgttcaatggcctggtttgcacatcaaacccagccctgtcatcatcatccagtcgccttctccattctgccaagctatcactcatcagtgcgggtccatcactatggtccttggtaggagtccgctccagatccagctggctgctcagacggtaattgcggttggtgctttcccagtgacttcgcaaagcatccaactcgttggcaagtgaatccagagccatggaaccacgattatcggggaatgtagaatcctgagaggcattgctaccagctcgtggtcgcccattgactccgctgatggtgttgctagaggcgttgctgtgtgtgcgcgagagtccaagtccattgggaccttgcccgtggtgggattgacggcgataatgaccaactgatgtttgaacctgctctagaagcatgttcaccttacgctctgcatcggaagcacgagattcaaggtgggtgttctcttgcttgagctggttcagctcggcacgacttttctcagcggcagtacggagatcttgcttaaggcgctcatgttcacttcgcgacaactggttctcagcggtggcttgatcgagatcttgcttgagctccgtgatctgactttcaaggctggcaatagaagaggcagttcgatcttggagttcggacatcgaaagctcaaggcgggaccgttcagcgtcccactcagcagaagatccaggtgtctggctgtctgaattctcaaggttcttctgagccacatccaattcagattgcattttagcattttgagccttataccgacttagctcatctttcatccgcttcaacatcttctcggtgcctttcacgtaatgaaccgctgactggtaatcattctcaagttgctcaagtttctctcggaaagctcggtcggcttcctgctcacgactttcaaagccgttcttcaggtcgtcatgagccttgatgctagccgagagttgttgctcaagctcccgtagtcggctttgctccggagtgccgaatcgtgatccgggcgagtcaagccgtggggaccgtctggtgtcactgttcaccccacgctcaccaagaagatccttcaaagcagcgtgctgagccgctaaagctccagcctctcgctggtgagtttcaagttgtgccttcaggtcccgattagttgtggcggccgattggctttctttcattgcagtctgaagctgtctgcgcaattgcaagccttcacggctagcctgctcctggtatgcttcaaggccagcaatccgttcctctgcacgccggagcttatctgaggcttcgttggcggctgcctggttagccttggctagagtggtggaccgctcgatctgggcctccatagcagcgactcgctggtcagcacgagatcggaacgaatcagtcaaatctgtagaagatgcgcgttccagcccagacagcaaggcaagcttgtgggtttcagcctccttcgcgtggatctctgctaatgcctccgcatctcgaaggcgacgcgtaatgttctccaaatcagtagtccgttcttcatgctccgatcgaagctgcagaagctttctctccagaccctcgcgacgctctcgctcctcttggaattgcttctcgacgagggctgtcttcgcagtggaggcggaaatagcttctcgaaggccgccaaagctagaatcatagtcctttaaacgggtggaggattcctcaatctgcgccaacaagtcttctttgtctagaataagttgttgaagagaggcttccgcttctgcacgcaagaaagcctcttctctggaaagagcctctgcttggtggagctcagcgcgcagattttctgcttccagagtattgctttgcatctcaagctctgccaggtgcttccgggttgcctcattcgtctcttcggcaagctccttggcttgacgctcctgcgaaagctctgtggtctgcacatctaatttagctttcaactcggatagggaggccaaagcgagggcaaggcggcgtcccatgtcggtgggtcgctcgtcatctccatcgcgagaagcatcaggctggggagtgcctcgctgactgccaccatgagcagcgagcttcgcacgggagtatgcggcttcattgatagccatatcgcgttgatgttccacttcagcaacccgtttagatgcgatggccgcttgtcgatccacagtggcctgcatcttgctcaggtcagctctcatagccaagaatgcctcaaccagcgggcgatcctcatcgctcagagcctcattagcccgatcgtctagcgcggggctactggttgcattgggaacatagccacattttcttgccagtgcgagttcggaggcataccaggcattccgggccttggtaacctccaactcttttatcaaagcctcttggtggggcgtaagtcgaggagaccgtggctcatcaccaagtgtcttggagttgcggaaggtccgagattccaccgaaccctcgatgctagtctgccgaccgaggattgattcctcaccgctgtcaacagacccacgctgtctttgagatcggagcgaccgttgtcgacctggggtactgatcaacggagctgcctcgcctgcttccatggccttcgctgatggcttttgatgttgtgttggggttcggcgaccagctgatggaggtccctgggaatcttgcggaccttccttcataattggtgattcttcgccacgctcgtcgtttgatccacggatatccgcggttggtgtgtatccgcgatcattctttgtcggggtcttgctacgagggttcgcaccagctggagcgccattaccacgaggcccaggagagggtgcttgtccaggaggcggtgggccagcaggggcttgggcaattgatgcccgtggcagtcgagatccaggtcccaaatttggattggggccgaactcacctggcctattaccagccgcaccgtgtgtcatgctctcacgcgatggtgttggcccacgtcgcatttgcggttctgggactgcgttttgtgcctcgcgagacgagcgtccagacgagattccaggtttatcaacacttgtttttctggtcgccggctcgggaacgcgtcccccaggttgcgaatcattggggtaccggatcttgctagtatcgaggatgtaggacatgctaagctccgccgagtccctaggagccgagctcggctcacccgccataacaatgatctgcttaccgaaagcagtcatgctgtgaccagatcgaggggacggcgcagggcccatgttttgaaaggagtaccaacgtcgagttgaaatgcggaaggctgacaggtctcccaggtccacaccttcatccgtgcgacctccgaacacatacatcacatcgttgaccaaagcagaggcatggccctccctaggagccgggataaaaccaacgcaatcaatctcggtccagctgttggcgatgtaatcataagaccagacatcattgaaccactgcactccattcgtacctccaaatagatatagcttctcgttaaaactgacgatagtgtggttcgttctcgctggaggaatttggcctggcgggggtccgccttcgtgactgttcgggatcaagacctcccatttgtttgctgggttttgaagctggttcaaatcaaaggcaatcaaatcattgaagaagaagccctccacttggcctccgaagacgtagagtttggagcctaggatgttcaaagtgtgaccgtaacgcccggaaggtcgagagccgggaggaatcgcgcgggaccattggcgggaagctaaaaagataaagagtcagggtcatagtaacatgaataatcgatgccatccttacatgtgttcaaaagatacagggtgtcgtcgagagaatcattctcgtcgattttggtatcaccgccgaacacaatgaacgcattcccaacaagcaaactggcatgaccaactcgcgggccagggccttcagataccgtcgcaacctgcagacagttcaagcccccaccactgctctcaatcatccatagatcacccttgacggttgatccatcgatcaggcctcccatcatgtatatgtctccttcctttgatgccaccgaattgattgctgctccataccgaggaaatgggttcatctggggagaagagaagttcaagcggcgttgcgaccatgggtaaagggatgaaccggggcttggatgggggatcccgttgggcggttgctggggtcgttgcatctgtcgtagacattagagctatgtcctcgtcaaatagcgaatggatcgcgaaacagatacccacctgggattccgattccgctctctgtcgcggccgtactgcgtctggactcgtcgggcttgcggctgagcgtagagagttgctgaaactaccgctcggggtcggtgtctgggaatttgtgccatcccccttgaccccatttgccatagtaggggatccagcgggtggagcaccctcggaggtgtggacatttctagttgccggggggagtgcagctgcagccgcctgctgactgtgctggtgcttcttcgatttaaacagaaaggccatcgtaatttatgtggtcgtaatcggtcgtatcaggggatctggcgcaaagtcaagctgcgcctaagtgtggactcgatccgacacccaaatatcgaaagaatggcgtggtcccgaaagattaagtggaaaatccgagggataggggagttgtctatttcagaagtgaagtgggaaccaggaaccactaggaaccataaaacgttccatgcacaagccgctcagcgtccccccaaaaaaataaatgtgggcagggggaggcttctgaacagaagcattcgcactaagaactcgaaaaacaaatcaaagcggcaaaagccaagggaagaaagggggaggttgaaggcaggaaatgtgaaagaggaaaagcgaagatggaagagatggccgtttcaatttcccggagatgctctaagtcaaactagtcttagtttcattggacatgcatactcaggggcatactatcactcgaatctttacttcaatgcttgtcttctacttatatcccccgtactgcgtacattatactatttccttcattcctttttcccagtctcttttttccagcctccaggaaccgaggggggattgacattccaccatatcagcgacacgtcttgagcattcggatgttagatgtcggtattcccaaagaaagtgaaaattatatagaaaaaaaaaatatataaatatatcaaaactataaaaaaggtttcacaacaatgtcgcaaagccttgagaatattgagctgcattatatccaagggttactccgtacttcaaatgccgtccacagccctggacctggaggcttgtgaaccctgactatcacactatcacactccaattgctatatgccacgggccgaggactcgccacggtgtgaacaaatgcaggtccaataacaattcatcctaacactgcatttctggcgatccataccccacagtgtgcaagaaacactgattcagattaaggctgtacaatataactatgtgagctaatgagtgactctaaatacctcgctaaggaaaagatagagcttttcgagctgatagatccaagggaaagggggttcccacctatgaaaataatctgggcgatctctcgtttcccggctctagggttattgtagggatgagcctcttgatactgatgtacttttgcagtaatctatcttcattggctacgtctttcttgctttttctttttggtctgctattttgtataagaatcgacgtgtcagattttggatgtccatcctttcttaggtgaaacctttgatgtcccctatgattgctgtcttagacatttccaccatacaatatctctcttagattacagcaaaattaactaatatgttcctaaattttgtcctacccagatagttaactaactaaccgtagtactccgtgatgtaagcaaattcctacctgcttctaggctggtgtccgcattcaacatctccaattaagatttcgtggttcatacactctatagataggcattcaaagctgactacgttggaagaaagagctattgaccatttacaggtcataattgcctctgtcatattgtagaacgacgcgccagaaaactacacatttgagtctatacttctgaatgccaagacatcattctgagtaatccccggaatatctgtgtttccgcatccatctcgcctctccgaaccacatccgctctagacctggcagattagctctatttggaccagaattcatagactgtgcgctgagctctctccgcgctcctggaatatctccagggcagtcgcaatttgagaccagtctatcactacaaatttgaccaactccaaggtcaccccggccatttcatcatctatctcttccccagcttcagtcgacaacacccagacccacacgagggaactcaaggaggaaactcactggttgtgaccgatgaccgagcggggatactcgcagcttgccttgacatatctttcagccctccctcttcccctatactcgggtaacacaatgatcaatcatacaacatgagggatcccactaccgatatggaacaaaactcacagcagacgaccaacgggtccacggcctcgcgtcgcaatccgaataaatcggtccgcgtcgcgtttggtcccgacttagagactacgattcccacccgcgaaagatctccagccccgttgagtagccatcatcgttcgctcacagcagttgaacacaagcagcccacactgacgccacacgggcgcccaaccagctcttcgggagagaacattgccatcggagagatcccacctcgccgtccatcgcctcggagatctgagagtagccgaccggctatgctgaagagagctaaaagtgattatggaccaagtcggataaccttcgataaagtggcgggcgatgacgacgaagatttcgctatgcgacatggatggcaggaggaatatacctccagtgaatatctcaagatcttgcattctgtgagaatgaccactctgatcatgagtttccggaagctaatataaatacccgctggatatagaatttctacatgtatttcaccgagaaacgccacgagaccaacggtattcccagggacccagtcgggagttggccaagccaggactggcgcatgaaagaccgcctgaaaactgtgtctgcggctttggcaatttgtctgaacatcggagtcgatcctcccgacgtggtcaagacgaacccgacatcaaagcttgaatgctgggtggatccgagttctaccacaggtggtggtcaaaacaagatcatggagcagattggcaagaagctacaggagcaatatgagactttgagtcttcggacaagatacaaacagtatctggatccatcagttgacgagaccaagaaattctgcatctcacttcgccgaaatgccaaggacgagcgagtgcttctgcattacaacggacacggagtgccgttaccaactcagtcgggtgagatctgggtcttcaacaagaattatacccagtatatccctgtcccactgtatgatctgcagtcttggctagccgggcctagtctttttgtctttgatgtttcacatgcgggcaacattgtccaaaacttccacacttttgttgagaagcatgagaaagaaaatattgaaaccaagaaacgagacccgaatgccgtccttcagaattatggtgactgtatcctcctggctgcgtgccagaagacggagtcccttccgaccaatcccgaccttcctgcagacctattcacctgttgcttgacaacaccgattgaaatcgcattgcgctttttcatcttgcagaaccctttacgcacaaacattcccattgatgacttccgagttcccggtcgcctacaagatcgccgaagccctcttggggagctgaattggatcttcactgcaattaccgatacgattgcgtggaacaccttacctcgggctttgttcaagaagctcttccgccaagatcttatggtcgccgctcttttccgcaactttttactcagcgaacgcatcatgcgcacatacaaatgccatccgatatcttcgccggaattgccagacacacatcatcaccctctatggaaaagctgggacctcgcagtcgagatggtgttatctcaactaactgctctcattgatcatgatgaaggacgccagcagtacgagtaccagcactcaacgttcttcgctgagcaactcactgcttttgaggtatatctgtcgtccggtcctacagagaagaatccaccggatcagcttcctattgtcctccaggttctcttgagtcaggcacaccgcttgcgggccttgattcttttgagcaaattcctggatctcggaccatgggctgtccaccttgcactgagcattggcatattcccttatgtcgtcaaattgctacaatcagcagctcaagaattgaaacccgttatggttttcatttgggcgagaatcatggcagtcgaccacactgtacaaaatgatctactcaaagataacggcattcactactttatctcaattctgaatccctcttcgcccattcctgtgggcaacgccagcgaacaccgggctatgtgtgctttcatagtctcaatcttctgcaaaaactaccctcagggacagaacgtctgcctttctgtcgagctgtttgattcgtgtctcaggcatctcggggatgtggaaaatcctctgctacggcagtggtcttgtctgtgtctcagtatgctctggtgcgatttccccgaagcaaagtggatgggcattcgatgtgcagctcccgctaggctctgcgagttgaatttcgaccctgtacccgaagttcgtgccgccatgcttcacgctgtgactacgttcttgggaattccagatctgactgaccaagttgcacaaatcgaggagactttagccctggcagtcttgcccatgtctgccgatgggagtgtggtcgttaggaaggagcttttagtgttcttctcaacattcgtcagacgccaccaaaacaaatttttggtcgcagcatttgaggagcttgaggaagaaaagcggtccctgtgtcatcgctgggagaacgaaaactctaagactaggcgcgccgaaggacaaactggagcattagtttctcatgcgaaacacccccagctgtctcgcaatactactttcggaactatctggaagcagttgctggctctctcggttgatcctcatcctgacatcgcccaggatgccgccgttatcgttgattacattcaccttgccttgctagaatccccaatggcgccacttactaacaaacttcagaacgagattctagaagtcacaggcttgacgaaatcccaacctcgcgagcgaactgaggtgaagaaaaccgtgccacctgcaacgcctcccttgtctggagcagcagcttcgagacaagaaggctatctttctttgggttttaggcgaactgccagcgtcgctgcttccctgaaaaaccttgcttttggcaattcgtcgccagacctatcctcagataattcaaaccccccttcgccttcaaccagccgtatgacaattaccccacgcggccgcgcccctcctgagtggacccgacccccggaaggaaatgatcatgttgctcccgcaacagcgtaccaccaggctccgattcccacatcccgagggttccaacccaagggcattgatgtcgtgcccgttattcccctaaagagtcgattcctcgactggtcgaccgaggtaattccggattttgaatcctttctctcccacaactatgattaccagcaattactcacaatttcgaagtatttccgggagccccaaatgaaacccaacgagccggatgagcccggtagctccgactataaccagcgtctctggagacgcggccgcaacgaaaagatcattgctgaaacccaacccctcaaaggaaaagctggagcaagccgatgggacaactcgatcgctttgctatcgaatggtagccagccccacaagatgtgcttccatcaatttgaggatcacattgctgtcgcagatgaccgggatacaatctcgtgggtacaacaagtcacctgttcttcattatctcctaaccattagtttcgtatagaatctgggactggcagagccacaaacgcctcaatcaattctcaaatggcaacccggtcgggtcaaagatcaacgaagttcgatacatcaatgaggacgaccaagccctgcttatgactggatcttcggacggcgtgatcaagcttttccgccattacgagactaataagaagattgaagtggtcacagcctttagagcccttcctgaactgattccaagcaatcgtaacgcaggccttgtgcttgattggcagcaaggtcagggcaaagctctagttgcaggtgatgtcaaggttatccgcgtctggaatgctgctactgaggtgtgcacaaacgtaagtattcaatgtcttgtctcgcaaatataccacgttactcacaaaagctcaatgacaggacattccggcaagatcgggctcctgcatcacatccttgacatctgaccaagtggcgggcaatatattcgttgccggtttcggtgatggtgctgtccgagtctttgatcaacggttgaagccaaccacatccatggtcaaagtttggcgcgagcacaagcaatggattacaaatgttcatatgcagcgtggcggtctacgagaattgatatcaggtggccgaaatggtgaagtccgactttgggatcttcgcatggatagcccgatctccaccatctatgctactaaagacaccctgcggaccttaagtgttcacgagcacgctcctgttttcagcgtgtacgtttcctccgccgccatattctaatgtttgttgtacgctaacataacgcaggggtacaaatcgccacgaagtcaagactttcaatgtggatggcacctatctttctacgtttgagccatactcgagcttccttcatcacaatcgatcctcgcccattgcctgcactgccttccatccccaccggactgtgcttgcctgcgccgcattgaatgaccatcatgtgaacctagtgtcctgctaattccaactcagctccgaaatccatgataccttcgtatggcaaccttcatgacgttgtttctttctcttgtcctaatattaccctttctgtaatatgcattcgcatacccgatgaacaaatctacacggcgtcttggcgattgacttgatcaaccatacattgatggctctgcgttgtttttttttgttccctcgggaatgcttcactgccctttgatattcgtgatgattcctttattcttctatttcgtgtgagacagtgtgcccagtttcgggtctatgaatttctttttccttcttttccatttttctcttcctcggtattaggcacacaatatcttgtagcaatcggcactagttgatttcctgacagaagaacgtataattgttggagtgctcgagctctgctcgctttaatgcagtaagtacagcgcaccagaggcagtcctgtcttgactgatagcctggcctggttctattcttcttctatgctttttgatgaatcgatacaatgcattagttagtattttgtgggatctagcttaggtctttatggatgtacttgatgcttggccgcgcactttaccttagtgccccacctgggcaggattagggcgtcatacgctcgctgggtggaatacgctggccgtttcttcgttaatatacttcggtgtagttgaagggttgacagccacactttgtgtttctgtttaatctcttgcatgtttccgggcttattcggccgattatgtggtctttcttcttgaattgacggtctgacgtgttgaataacctgaattttcaaatcatttagaaacaatatcaagccgttgaactgaacgcaatactacgatatctggtctgataagtttctggatatatcttctgatcatcaccctaccacatgtacaccatgcccaagggaatcacggaggaagtcttggttatatcgcatcctcccgaaaaggacattttcatttatatcatctaatgtgttgtgccaggtctgattgggaagaggcagagtgagggcaaatgtagtcacgtgtagtcatctacaagtaaaggtagtgaaaaaaagcagttagtagttttaaaagatacgtgctttgtgtatgtaacgaaaagcgatctatataattacgaagcatgagccgaaaatgtttgcaaatgtatcttcaattatttatcctgaccaacttgaattgacgatcattcgaatgcagtgagatataacaaaaaaagtagattgatattaacattgtttgatcattctcataaattactcaagctatgaagacagcctagaaaatttcatataacatcacactcatcaatcgcctagtatttgcgctcgctgtaaaccgtctcatccgcgtcgactctagggtcaagcttgttcaatagatcggagctgtggggaccagaggtcttcccagtcttcgaggtttctgtgtagctgttgccaccgccggattgcccagtagtgctgtagttctggctgctagataaaggattgttcgagctgtgaccggtctgtccagtggtggtgctgctgtaattgtcgttgctagacaaagggttgctggagccgtagccagtctgtccagtggtggtgttgctagacaaggggttgctggagccgtagccagtctgtccagtggtggtgttgctagacaaggggttgctggagccgtagccagtctgtccagtggtggtgttgctagacaaggggttgctggagccgtagccagtctgtccagtggtggtgttgctagacaaggggttgctggagccgtagccagtctgtccagtggtggtgttgctagacaaggggttgctggagccgtagccagtctgtccagtggtggtgttgctagacaaggggttgctggagccgtagccagtctgtccagtggtggtgttgctagacaaggggttgctggagccgtagccagtctgtccagtggtggtgttgctagacaaggggttgctggagccgtagccagtctgtccagtggtggtgttgctagacaaggggttgctggagccgtagccagtctgtccagtggtggtgttgctagacaaggggttgctggagccgtagccagtctgtccagtggtggtgttgctagacaaggggttgctggagccgtagccagtctgtccagtggtggtgttgctagacaaggggttgctggagccgtagccagtctgtccagtggtggtgttgctagacaaggggttgctggagccgtagccagtctgtccagtggtggtgttgctagacaaggggttgctggagccgtagccagtctgtccagtggtggtgttgctagacaaggggttgctggagccgtagccagtctgtccagtcgtcgctagacaaagggttgctagagccataaccggtctgtttagcagagtggccagtggtgctgccgtatttgtcgttcgagccatagtcggtcacttcgctagaacggccagtgccgctgccaaaggtgttggtggagccccggttgtctatgtttccatgttagataaatgactctagtatgttttccaggggcaagttaaacttaccgagatcgctatcgacacggggatcggccttgttggctcgcttagagtcatggggaccagcattgatcttactggagccggtgttggatgagccatatccgccagcagtgtttgatccgtagttctcggacgttcctgggccgacatcaattggacccttgcgggaatcatggatagtgccagtgccagtgccagtgccactaccgtgacctccagcaccggttgtggatgaggtctcatagccggggccagagccagagccataggtgttggagcctgcgccggtagaagtgtttctattaaaagtattgtccgtagtcctgtccgaggatccgtaagtatcccgggtatctatgttaatagaataattagcatcacactgcaatggttttttttctaggaacaacgaaccatcagtcttgctgctggatgtcttcgactcatcatgatgatgaccggtcacggcatccttgactttgtgaatgatgttcgacatgatagtagtgttttgatagtaaggtgaaagatttggaaggagttgtagttggaagtctgactattgttcgagtcagatgattgtttgtttaaggaagaagtggaagataatgtgcttccatagccggtttatataccctattgtctttgcgtgtcttgaccagctcatgagttgatccctacttgtggagactgagtgacgccataacgcgggggctccacgagtataatcaccggtgaaacatggagaactccttcactgccttgtttacaactgtcatgacgtcccaaacaaactttacacatacagactcatagtcttggctgaaaatgcgagctatcttaatgtcattcatcgtcatgtcccggatcttcaagaccaacacgccactgagccaagtcttacaaggatatgctgtcgatctactcgccgactgagatttcatttcgagtgggttttccagactttcgtgccaataattctctgagtttgacattgctatatcgtggaccatggaagcttagctctgagcttatcttgtgtctttataagaagagtctagggtgttattattagtctcttatagacataataaacgtatcgaaggcagacgaagagattctcgaaagattcctgcaatatccactagtcccctttagtatatacacgtcatatgaggggttacataatttcccacgctaatccagatatggcaagtggggacaagctttatcgatcgtcaagtccaaaaatatctgacgggtgtgccttgaacttgttttaacattggacatagagtatactagctgattcgatcggatactacaacatacagtctatgatgttgcacacattcatagcgctgcttcaaatcaaaactggaaaagggggtggcttatggagttgcctagcagtgcccagccctggaggtgatggcatgatcggcgtagctcgagaaccttggaagcgatatcaaatcgactcggtacggagtatatcaaatctacaatacgtgtctgttattgcgagatccaaatgagggggcaaaaacgcaccatgccatcttgctaatatattgtgacattgtacgagttacagcatttgtcgatttctctcacaatacttgttggagtcttcttttcacatattaagcgcctgatgctataaatgagcggaggatatgcaagtcgttagctgagccagtatagcaccaaggtctaatagttacatattctacatagtgactcggtatctgatttaaggtcgtgtggtttgaggcaccaaggccaataaatgccttaggcttccaacacatgacacggcggacatgccgtcacttacccggggttagataatccacatcatgagttcatttccccttctccacctgacttcacttgaactcccctcctgtctatctgactccttgttcggtttggcttccctacactcgcgttggctgtcatctgtcgtctttcttcaaccagccatagtgctgcccattgtactcgatgagtggccgcctgctagcttgccgccaactgttggattggtcataaaagagtccacccaaagtactgtggtacagcggagccgctggcatcgtcaatcattcacttgatccaccccattttgcagtgattagatatctccgattaagccactctacggtagaagaggctaaacccatctatcagagacatgcgaccgccacgcctgctcatcgtactcttctgccttatcttcttcccgatcctcctcaccttcttttccgcgcttacatcacccgatgtagctcctaatactctcgctggtcagaaaactgggctgcgagctttgttttcttttaacataccatcgtccctttttcccccgtcggctattatcagtctcaccgatgacaactcgaccttctttctcgcccgaccagcggcatttggctccctactgccaaccaaaggccttagcggtcagctatgggtgggaagtggctttggtgaggggggattagctggtggtgtggagggagaactgggctgctccgatatccccggctggggtgagagcaaaaatcataagaaacaagataaaacctctagagccgcggagcagagttccgggatctccgggggaagtacagtgaatgatcaatcctcaaaccgcccgcggtcggtgtcgcaggtcgatactacgcagaacgatagagattcaactaccccgcctttgacgaacgatggcactgacgaccatctacaccatccactccctgaatctggttcttctaaccccgggatgaatcagaaatatggagattacgtccaaaataagccgcctgcgcatgccgacatccaatcgctacaggaaactgccgaaatccagggtaaagtagtgctgttgagtcggggtggctgtgggtttttggagaaggccaaatgggcacaacgacgaggagggattgctttgatcgtcggcgatgatacccggggtggcaacttggtcactatgtacgcacgaggcgatacatcgaacgtcacgatcccggccttgttcacatctcacactactgctcatcttctatcgtcattggttcctgggcatacaggtggaactgccggtttagaagatgtattaaaatcatcacaagcgaagctggcaggacaagctgaagccgataaagaacgggtggcaactactaccgcaacaacaacttttcctagtccgactgccagcagccattcgacaaccaaggagaaacctgcaccctcttctcactcggaaggcgggtttttccgtgcaattggtgcattcttgggattgtgcgataagaacggaggttcgcggcgtctagaagacagccgacgtccgcctagcagcggcaacattgattggatcaacctaggctcacggaatgaaaaagaagccccgtcgagcgcttggaggagatcaacagatctcaatcatcatggtcgggccaaggtagacgacacattcgacaagcacaaggccgacatgtccactgaaggtcttgaggatgatgactttgtcatcggggttcaggactggagagatcctgacttgatgccccctaagagtagcacccatccgacaactagcatccctgcaactggcaaggatacctccaagactgccagtgcggataaagatgcctcttcctcgcccaacggtcttcagggtggtagcatcacaccaggaagtggagaataccagagcttcgagaaatccagtgctggttctcatgacacgcaccgcaaggggtctgagaaagaaaccatcggaactcatgggaagtccagatcttcttccacgaagggctggttctcgagtcactttggatggggagatgatactcagcaagaccctcagccttcttcgtcgccttcactccagaaaagtattgcaaccaacgagcagaaacaaaacaacgctcccacatcaagccgtctcagcgcggagtcttccgaacacgaaggtctttgggttacaatgacacctaccagcatgtccaccagcccctttttcgatactctattggtacttgtcgtcagccctttgctcacactgacggtggtttatgcccttttgctgatccggtctcgaatccgccgtcgtcgctggcgtgccccgaagtcggttatcgaacgacttcctgtccgaacctaccacacaattgccaccacttcgtcctcgtcttccaactcaacgcgcccctccagtcccagtcctctatccccgacttctccactccttggcacagatagccgaccaagcgcatcccgatccaatagatcacgttcacaaacattctcgggcactatactagactcatctgtcgtacccaaagaagagaagtgcaacctgcaaggtggatctaccttgtggcgacggaagtacacaggaaggcaggtggagtgtgtcgtatgtcttgaggaatacatcgatggtcagagccgggtcatgagtttgccatgtggccatgaattccatgtggaatgcatgtaagtgacgtgaatttttttgtcttggttgcgaagttttactaacctcttttctcagtaccccctggttgaccactcgtcgacgaacttgtccaatctgtaagggcgatgttgtccgttcgttggctcattgtcaatccggcgattctcggggtcatcgtgagcagtctcttgatgatgttcgcagcgtccagtcaatctctagaggcagcgcatcttccgctccagtaccaattgagggcgtcaatgacgatgcttcagatacggaacaaaatgcaggtctacctggcgaccatgcaaattctgccccacagtcaagctggcgaaacctcgctacccttagcttttctgctctgagtggcgacaccatatggcaccaggctcgcgcagaccgcaatcgctaacatctatattctatccactcttttcgattttcattaaaacattcccccctctgtcctgtggaatttgctctccttgtattgaagcatgctgtattagcggtcgtttggagtttcttatgatttggatctgcttggcgtttggtgagaacagttcggcttgctgggcggttgcaaagtggctgcaaggattgttgaagcggctggaatataccgcaggtcagtcgttcaaatcgtgtacgttcttatgttcttttggtagaatgggtgtttgaatggatttcattgacacttggctgtcataatactattgctatgctaccatcctctagtttattgacactgaataatcgcctaccaacatggcctccgcagctgcacttgtttgtaatttatagtaatcgaagctgctcaaaccacacctcgattcaatgactcagaccaaacgctcaacctcattccttctcaacatagacattcctagcaatatccccaaacacatcaagtgtatgaaccagtcgatcacgcgccaattcaaggcgaggaatcatatcccgacccaaaggcaagaaccactcactctcacgtccaacacccacgccctcaccaacgatgacttcatacatcgccctcacagccttatccgtatcgccatcagggacaaaattaccagtctgtaaaacatccagcgtctgcgcaaccacagagccgacatagtcgaccggtaaaggctcagcgggggaacgacaaccagccccgaactgcgtgttgaacgctcccagccataccgtcaggacacggacgttaaagggcgcgacttctttagcgagggctttacataaacctgcggaacatacacatcaacacataaacgagacatccctcggcagaagaaagagaaaaaggagaactgtaccatccatagcagccttcgccgacgcataagcacccatactctctctcccttccactccagccccagagctgacattaacaacaaccccaaaccgtctttctctcatcccaggcacaatcgctctgatcagccgatttggtccaaaatacacagtctccatctgggcccgcagctccttgtccgagaactgttccactgccccgaggatcgcgtatccggcgttgttgaccaacacgtcgatcttgtgtgtagactcgagcttggataccagctcagaagcggcggttgggctgtcaacgtctagtgtgtgccattcgcccccgttttgggttatctccgatactatctccggggtgcgagagggttgtcgtgatgttgcaagtactttgtggccgtttgattgggcggcgcgtgccagtgcgaggcccaggcccgaggagcagccggttataagccagactagcgggcggttgggtttggtgaatgttggtgcttctgtggccatggtggtttgtgacaggtgttggatgatggtggtaaagatttgactgttgtgatgttgatttgcgataaacttatgattacagtgtcataatatcagaatagcatgtctcttatatcgttctattactgcgtgcctcggacttagggcggagttaatatggtatgtcagcattggggcttccatttcgaggatttaaggtggaaaaaggacttaagctggcgtccggcggttgacaaaggtcatcatcggcttgatctgatatccaagctacctcacatccacaaggttgtaaatgaagttgtcataatttctacagagtgactccaatataaacatgcaagccaaatacatacaaaaagaaatcacagaaaaaaaaagagaaaagcagcccatcaccccggaaaaaaacaaaagtcaatgccaagttcaacaagatcccggcacacacgacaagctacaagcgaaccgccggaacggtaaaggccgaagcatctcattcggacagcggggcatcttcattccattctcgaacggtatcaagtcccaccactccatccattcagcacggggaatcacgtactcccgctggcatacggagcaggactttccaccagcagcacgcacttccctcgcttgttgcagcaagggcacaatcagcgccggatactcggccagctcttcatcggtggtttgctccaggtaaggaagcttgctcacagcacggagcgcgacttcacggagggatggggcgtcgtttacaggagatgccaatcctggtgtgagagtgagtctgttgctggatgggctgtctcccataggattgccctccatgtccatgtaggtgatcgtgcctgttgcgaggtggagaggaccccacctctccgtgtgcgattggaccgcaggagacaagtcctcgtggttctctttttctttgttgttgtagtgccgttctgcgatcttcgctttgtcgtatgtgaggaatgggttcgggcgtacggtcaagtgtttcagttcgccttgctggatgagtttgagaacctcccagggaaggtaggtcaactgattgacggaaaggttcaaaacttccagtgctgtcagtttgcagattgtagatgggatttcggccagcttgttgtttcgcaggctgaggactttaaggttgctgagctcgaagagatctttgtgcagggttgatagagagttgttggggagatatatgctgaggaatggctgcagagacgtgaagacgttctctgagaccggggctttcttgactgatggaagcttcgtcaagtgctgtaggggtagtagaagaccgggtggtatagttcccagattgaattcactgcataggacaaagctattaggatcattggcatgggtgaaaagggacatcagatgaaatggcattagcacataccccaggtcaatgctttcatgtcctttatcaagacaatcaccgataacctcccgggcaaaccgatgaggatcggattcctcgggacttttgaatgcaatgcgagtctgtgaagacatgttctctgtctcaatactgacaggtatagagcttccaggttttctaggatcaagcacagacttgcgcaagtcttccccccacgccgagccatcctccgacggcaaaagcgactcagcaaccgactcatcactccccatccacacaccactatcaacattcctcttatccttaaagtctgcccttttccgcttcggatccagcacctgctccccccaccaggtccctcgataccgccgtttccgtcccgcgcccgatactggcgcatggtagttctccagcccggaagccgggatatcgtcacttgagaaaagcgcaggatcactggatggctgactagagcggtcgtcgaagcgtgatagtcgctgtgcgcgctggaacgagaccgctgcgcctgtcgctgagggattcttcacgggtgagcggtgccggactcgccgcgacggtgggagggggatctcgctgtccattgcgatctcagttcgcggattcagacgagtctcttatagttctctgcctagatcattgggtttctattccaacacggtttcgatctgatgttcggagttgcgcgacgcgttgtggtccttgtggagacccgcgatggagacctgcgggtgtcaacaaacgcgctaatggatggcgcgattgggagagataaggggataggatcgactggaatcaattgagaggcatcttatattttggaagaaaaccagcttcccggttggaatggaagaagatcagatcaagagataagatcacagcacacgtgcacgggcatatcagttgaccccggagctcacggcttccccactggaatgtcggatcgacacgatcttctctatctttctaccacgtcgctgctattggtgtttatagttggaattggcatcaaaggggaagaagaaaggtgtctatattctgtggatgactcaaactcgactcatgcaagtcctggatatcagccagaccagtctgacaactagcaggtcacccatgacaacgtatatggacaaaagaattgaatcaacagggtttgaagaagagaataataacagcatcaactcatatcggtccaaaaagtcataatgaagtgaaaaaaatggggtatttgaaaaaagcgttaagccatttcctctctgaaaacgggttcttcagctgaccgagaggaatagaaatgttaaagtgtaagaagaaaaaagaagaagatcccggctctgctagagataaacggcaatcaacaaggcagcaagtcatgcagtatgaactgggcgcagtatggcagtggctccaattcatgatcgttgcctgcatgaaggcttcttgccgagaaggcgcgattgtaattacaaggcttggcccaccatcacaacgatatagccagcgacggccaaggcagctggcatgccggcgccaatgttggccgctgcgccgatggaggtggcggctggaacagcagaagtagtggaggccacacgagagaggggagtcgacgtcgaaacagacatggtgctcaggtatctcgcgctggaacttgggctgggacttgggctaggatttgcgatggtactcgccatggtacccgcgacggaagtcgtgatggaagtcgtgatgggagtaggagttggggtcaccgaattgacgcgaaccagagtcttagtaacggtcgtggttgcagtcgaggtaatggtctcctctgcggcgacgaatggagccgcaactaggcaaagggaggcgacgatggtggtgaacttcattttgcgaattgattcgaaggtagatatcaatacggaagagggagcaaagcgattgaattggatttaagattggtgaagcgttgatatggcgccaagatgagaatagatgtttcaaatttgatcgcaaaagagtgagcgtcaaaagagagattcaataaagatcgtgtggagcgctgctcagacagtataaaagggtgactgaaacgagtgtatataagagaaatctctgcgtctagggaaaaagggaaaaaaaaaggaaatttagggcatggccggggctaaataaagtctcgaacctggggaaaagagccattcagtcaaagaagtcttgtggcgcttctgttttggtcttgtatttgctctcttgtattattgtttgatttgcaagtgaaacataaccttcctattggtccattgaacacgaccctggaagattgggctccattcagaccgaactataacatctgaagccctaaataccaaagggttttccgcacagactctacaacaaagacgccaggggtaaagtctgtgattatcgtatgaagagtagttaaatgccatagttgggcttatttacatctgttgctcgtaatttcaaactgtgtcccttggtgcagcaaacacgagaattcttcgcctcgtactccgtatactccggtgtaattacgccacttcctatgttcagaactgtttccagtggcgcctttgcttattttgcttactttgttgttttgctgttttattacccctagagtgatagttagaatgacgattctcgctggacatcacatgctactgcaagtgttcactccctcgcgggcacttccgtcttttccggacccctggcgtcatgcgcaggaagaacaatcttagacataacaataacagacagtttatggaggaattgacttgggtcctgatctgacatcttacctgccttaaaatggttccggtggttcgccccaatactgaaatttaccgcaatttgcccggttcccacactatttagaaagaaactttttgtgttatacatacggagtactatttcctatgttaaaggctctgtagatcgtttccgtggttctattcaggaacgaaaaacgatcgtcgctcgggcctactgtgttgggaatctcgactccgtggcgtagagtctggggaggaggtgagtcattcgatgctcactcattcgtgttcttagccttacaacatataactacattggcacatggtgttatgtgttggcaccatgtcattataagaggtgtctttttcaggggctctggcctcattgggctcgccaagccctatgtcctccacttagaatacaacgacaaatcctaaggctactacggagtatactctgtcgtgtcgatcgacttaaaatttgaagatgatcattatccactccattgtccgtactcatccgtctagggtcatttggacaggaaaaaaaagggaagggggaaaggggttcgctcttttccttctcatgtttagcgctcaatcttattttttgttcaataagattgcacaaagtagttggttcaaattagaggcactcaaatcctacacatgataggttaaatagtctctttttagctttggttgtaaatcggtgctttggaaatagcgttgagaccaatactgtcatggttagatgaaatatatatcagtacccattaccagttcattggtccttaaaatacgatcattttcgctgcaacagagcccgatatcaatcaaagttgtctctagacactaggttcctctgggagaactcggagaactcgtggccattgacatttggtctttgatgtgcgatgattctacgtcgtagacctctaggtaaagactgtattgtatgtagtatcgaaagtaaagaccaagcatgtcagaattgtcaatcacatttgcactcgctcatttcccaactatttccccattcttgtcatcttcaatcattccagttctctcgcttacaacgcaggcttctcatttttgatgtccccgaactgattccgccagaggttctgatatcttccaccctccttcttcagcagctcttggtgagacccgctctcgacaacctgtccctcatgcacaacaaggatccggtcggcgctggaaatagttgaaagtcgatgggcaatgacaaacgtagttcgcttggctctcaatcggtccaacgcagtctggatgtccgattccgtgctcgagtctacggcactcgttgcttcatccagcaggagaatcggtgacttctttaggaaaacccgagcaatggccatccgctgtagttcaccgccagacaacttgacaccctgctctccgactgtggtgttgtatccgtccacaaacgtgaggattttctcgtgaatagctgcggcacgacatgcttcgtggatctcttcatccgaagccgagggccgggcataccgcaaattctcgatgatagatgcgttgaataagacgggatcttgtggcacaacaccgatagtctgacgtagtgagctgaggcttatgtcgcggatgtcttggccgtcaatatcaatatgacctgcagtaacatcgtaaagtcggagaaggagtctaaggattgttgtctttcctgaaccagtcataccgaccagtgcaactgttgtcccaggttcgatagagatattcacatccttgagagtcttcaaccgggaatcataggcaaagtcaacatggtggaacgaaacacggccatcaccaggcttcagcggcatcgcacactccttgtcagtgacgcttggcttggattgaaacaggaagagtagccgctccgcatcaactagatcagagacaagccagcgatattgcgcggagaggtaggccaaaggagagatgagcgaagaccaatactgaatgaagaaaacaaagtctcccgtggaggcgcgtcccacagaaatctcatgtacgatgagcgaggagagaccaacgaagcaaattggtttgagtaagtccaggagtgatctgcctattgctcggcgttgaccgaaacgggcgctagccttcaaggcgaggtcaaccgcttccgcaaagcgagacctctcgtacgaaaactggttgaagtatgtaacagtctgccagccttgtacggcctgatgcataatccgagtttcgtttcgctgtgtctgtgaaacatcacgtctggcgtcgatgttccagttagaggtaaagacttccgtcgcaacataagcaatagatactatcaccaccagcaaggacgcgtagatattgaactttaaatagaaaacaacacatgcaatagccaagtcaatcactgtcgggatgatttctagaatggcaacttctaacagactgttcagcgctccaccttggtcgatggacttcataacttctgccgagtcattttcgatatggaagtccattgacagattcatgacatggctgaaggcagcagcagtgatctgccggtaagagaactgcctgataggaatcttgacaagtgcctcgatcaatcctagcccagctccgccactgatgagctgcagcagcgcccattttcccagtgaagcatatggggttttgttggcaaagatgctatcggtgacatctgctagttgctgaggaatgaggatgttcagagcccggtggcatactaaacagaagatactggtggcaacacaaagctggaccttgcgattatttctggggaccaagtatggcagaaatatcgagaagcttttcagatattccaaccaacccttaaatgactgcaacttgtcattgcggagtcttttcctgcgcatggctgcatcattcttattcttgccggtgtccgaatcgctctcgctcttggagtccacgctgctattttccgagtcgttgccattcgctgcgccatatcttgtatgattgccatttaggaaagggcgcgactcttccgatatctttttcttcctctgtctagtctcaaatagaatcgcacttgccacaaagacaagcagggcaagtcggaccgctgagatggtgagctgcgtgattggcacccactgtctcggcttgggacacaaagagagcgcaaggagtggaatttcgaaaccagcggtgaccaacgagcttccagccacttcgtacttggaaggattctgtcgcagccacagtgccgtccatatgaccgcttgagaggtcatatgcaccaagaatggctgagaactgtccaggtcatcagtgatgattttcaaggccgtttgactgacatatgtgaaaacgatcaagctagccaagataactcgaggtcgactgcggcgcttggagcgagtctttcttctctttaccggagtgcgataaaataaaatgcatattacaatgtagagacttgctatcaaagtacagctataatgaaggggagatgctagcggagtagccatgatgggaggtgggacggaggttctgggtaaaacctctctagcagggtactagcagaggtggttctttatatattcccccattctgagcctcattcctataccaaagacccgttattaactgagcgactgcttattggatagacgcactgatcatgtcaaaggtgcctcctgcgccaggggctgggagaagggtgtcctagcggctatccaaactaaaccgggctgtagacttaggccgaggcggcaaaatggcttcattattggttggaccatgcagatcagactggaatttacctggctacaccgtaagttgatgctcttagttggcagacatgccttactacttactttgtactccgtgcagtggacatctaaggggctgactatgtttcggtgacttgttcgaggataagtaataagggaataatcctgttcctaattatcacactgtgatataggttctattctcaaactgcgaccgtgaccgtacttcgccttcgttgtctgtactttgatattgatcttcacctactctctataaagaaagttccatataacatgacattctacttaccgttaccgcgtacctgcacatgtcaaggcaaacagtacggtccctaactggaataatctaggattaaatctctaaatccccgagagcggctggaacagcaatctaacatccgtctgcatctggtttcaggatcagacaaacggaaacaaacagaactgaatcgctggtacagctgcctgttagctacttgtaggtagagatggctcctcttaaagggggtttctatagtttggtggctatgatcaagacaagacggttatagccttacatactgcctagcctgggcatcaagccacgtcttgagacaaaatagatgccagtccagtcaaataatatgacggttggctgtggttttactaaaagattgacaatcaacgtggtcgtattcagaaccaaccagatttcttgccctgactttggacttaatcaacaagggtagccagactagcccatacatagaatctttgacctcgtagattgatcccccgcccctttgagctggattctcacatcattggaccgtccccacacagaatcacagaggaattttctttccaaggacaggattgaatcgtgtaaaagagaaaaaaaaaaggatatattatcacgacaacgcctcacatggaacaactgagacaattgaacttcaacattcatgttctgggtactgctagattatgtacatcgcgtgtttaagtagcgagtacccatgaacttgtcgtcacagccatatttgggtagttgtcctgtctcgaaaccaccagaaaaagtatctcttaaccatagagattatatcgtacaagggacgtcgccaaggagtggtcatgtcgcatgtttcccgaacatagccataagactgcgagaaaaactgtgttcactggcgcattggccggaggggactctgtcgggggagcatcattggggggccccgagcacgaagccaggcatcgttgtgaggtccttcagagcggatgacgctaccgatggacatgaagagtctatttgaagggaagttgattagccagtgattctcaaccaaagtagtataacttcaaagctttcaaggagtcaaccatacccgaaagtggcgcctgaacctagcatatacttgccgagagtccgcataacaccgttggggccagcgccatattggaagatcgtcacagttcctgtttcagttagcttatcatgcacaccttcattcggggactaagtgggaccaaccaataatgaagcccatgataccaccaacagctgaaaggggagctatgttagcaaaagctcttggtgaacaaggctcggttgttttgtgatcacgtactggaacccatcaggcagcccattttcactaggaatatgtcagcatacttggttcaccatatatatatagtacccaaggaaaaaggacaccacgcggagggtgatctatatcactaggttgtagatgacatactcttctccaaagttgagggagcaccccctgggcccgcttgagcgggaggtccggcaaccacaggcattatggaaagctaaaaagaagcttgtgaattagattaaaaacagcatgcaacagcgctgagccgaatgaaagatctcgttgtgagagtcaaggaacaagctctttttcctccccggcttgatgcttctccgccttcgtcacgtgagtccctaacgggcttgaaatcgcacacgtgccggtatagcacgtgacccattttgcctgtcggcggcatcaagggcgtaggaaacaaatggcactcttgcgctcttgcgtgggttccctcatggcaactatcctcggtctctgatttctttttcgccacgtcttttaaagggctgcctgaagcctgcgccgaggcggcagtcccgtcttgtgcttatatcattgccctggcgtgagcccggtcgctcacgatttccgacctccacacaactccttggtcttgaagcacctattttattccctcctaaatatctctcagttcacaattctaaagtgagtccacttcttactccaaatacacaactattttttgtggggtcgaggcaagacctcgacctaggagtcaatctatttgtctctccctaaacagcactaacgcgaccgtcttgactttagtcgggcgacccaagtttcaatcacccttgcgcgcattcaatatcaccaacccccgggcataaaccaacattactagacgtcctctttttactcttgagacctcctcagaagacggcctacggccccttttacagttcgcaaccgtggacgcgctccgtgctccgtctagatattccattcccttgaaccattcgcatccttctctatgactgccgtggcatctccacctagtgtcgaatcggggtctcgcttgggatggtacagctctagtaacggaggagaaggagctctgtcttcagcgaatgcggacgacgtgtcacggatgttcatgccacggaaacacattcaacgctcaaactcctcgtcctctctagggtcgaactcttcggtctcctccgcatctactgtgaccaccccttcccaagatacccatgccgcgcagaattcggccagtgaatcagagacttggtcgtcatcaaaaaagaagtattcgaaaaatatctggcctagctcgaaatccgagccggtatcaggggtgacaaacgcgcgatctcaggcggtgcctgcgttctcgtcgggcccaagtgcgtcgtcgacaatgtccgcaatgcaccagcctctaaacatcgtcccatcgcaacagatgccccagtcatcgcagcagaatggcgtccgtgcgccaaccggcccaccctcggagaatctagcaattttgattcttttgccgatgaacggcacttttgacaggaaacagatcaatgtaccatattatcccgacgtcctacgaatcgggcgccaaacaaatgccaagacggtgcctacgcctctcaatggtttctttgactccaaagttctctctcgacagcatgctgaggtatgggccgataaatctggcaaaatctggatccgagacgtcaaatcttcaaacgggacatttgtgaacggtcaccgactgtctcccgaaaatcgggagtcagagccgcacgaactgcgagaaagcgataccctagagctgggtattgatattgtcagcgaagatcaatccaccatcgtccatcacaaagtctcatctaaggttgagcatgccggaacttatggcactactcctagtatccttgatctgaactttggggacttggatcctgcctcggggggaggccttcttccttctcccttgagccaaccgctttctcatacgcgcggtagagccggtagcaacgcgagtagcagaattgcccagagtgttgccagcaatcagctcaatgctttgcatcaacaacggcagatgaactactggaattccccaatctctatcgaacaggttgtcaagcggcttacggtgtgtatcacaatttatctgtatactacatatcactgattttttccagggcgaactgaaatccgcaaagcaacagacaacagatctttctcaagcagatgaatttttgacgacgatcatgaaaccaggctatgcagagaaagaaaagctcattaagccttctcctttggagaacagttctcatcgccagatgaatggtcggcccaaaatgcctcgagtcgactccttctccagattctcggatcctcctgcccctccacctcaacagcctctgccggagaaacccgacgcgttgtcacgaagtacatcagagccgttctcaccgctgaagcgcagcgatacagaaaaaccgaagagtggtacaggttctcctgtctcccgcgattctagtcagatattgaatctcatcgaggcgctatcttctgccaagcgagagattgaaacccatggaacacgtgtcaaggaactagaaaatttgctgttccaagagcaggctgctcgtaaattggcagaagacaaagtcaatgaattggagatgcgctcattggatgttgaagtcaaagtcgaaaacggcattgttccacctccagagaatggcgtagacagaaaggaggaacaggacgatccagaagcaaccgtacaggttaacggcacccatccttcggagactcttgctcccgacaacagccaggcagacgctcctgtggaagacaagactgctgaacttcagactcgcttggaaattatgatggaggagatggccgagatgagaaagcaaatggcattctttaaagatcgagccgagaaggctgaagatgagaccacggagtctcgcaagtcgttgaacgaaatgattgaaaccttgcgccaggaacgcgccgagaaggcatcagccacggcgcttgacaagaaaaccgatacgcatgattgcgagccaagcaatgggttagcagaacagtcgcttacgagcgatgatattccaacggattccaagacgaagactccatcgatgcagggctccgattcggtcacctcgcaaaataaggacatggatgctgcaaccgcagccacagcctttgcaacacaacgccatcgatacaactatgtacaagaagcaagtccttacgcttctatgtttggcgtggtcttattgggagtaggcctgatggcctatctcaacagttggcaaaagatcgacaaataaaccagcctggcctcgctttcctatccctttgacggctatttctattgcataggccctttgcataatttgactttgtcttctatctttttcagtctttgccagtcacgactttctggcgatgaatgtgctgattcttgtctcgcttgaggaccatcttcttgtcttcatattcggagcatattccctttagcccacactgtctcttttatctcacgaattttttgatgactttctcgagatccctcttgggaatctccttcttggtcgtcttctccgacgtccgttcctccccctctgtcttgccatctcctttttcttcgttcttcttctacctcctaccatgttactattagcctgtcacccttttataggtcgacatctctctttctcttttgtctgtacatgataggaaaagcaggatacattccttgcagcctctctttgaaacgtttcgttcgacaaagggttttcaggcattatcattcatcatgtcatgtcagcacagggctttgtgagcgtatcaaggagttcttattcgtactatgtcgttttctattcatgccatttgttattcgctggcagattcgatcattctccctcttttaacctcttttcttattggagtagtaccttcaacctatagtcctatctccctctctttcattttccatataagtccgtccagcatatacagtgcgtcaagtcggttggatggagcatgcgctctggggaaatcagagtttatttctgaagtatactctcaatgtacatgattttgcgctaggcttataacctaagggcaaacaaattgttccttgactgatcctgatcaagggccttccgcacctgtaatgtggatattgcacctgtagagcggtgagggtggtaaaaaaaggcttgagggctcgactgcatcccagaacaggaattcaggataaaaatctcctgaactgggttactgggtggtgtatagtcaccatcagcgttccatttggatcgtagtcactcagcaggatgtgcgtgtactcaatgttctagcgggtaattctgggcttggccacaggctcatagttggttcgcagcaatgggtgtgaagccttggagttgaacatccagcagatgatggtcgtgcaatcggatgaccgactaatcgtaggagttttgtcggggtgaccgcaagcgaattcacttaaggctgacggcgacttcaaccattttgatccaccttatccggctctcggggagctcggcatcatcctctaccgcggcggcctgacgtttcctcttctttgcggctgacttggattccggcttagaagccgcatctccctggtcagttggggtttgctcttgctgccgttgccgtttctgttcttcttttgctttaatttcttcgtcctcgacgatatcatccacgacaaccacgctccccgtattgacacagactgtgtactcggtttccttttcctcgaaccatttggctacgttcagcgccttctcaatagcccgccctgtcgccttcacaaaaactttctctcgcttctctggtatcttcgacaactcctcgagtatctgtttatcgttcttgcgcgtatcctcgagattgatgtttgctgtggcgcgcttctcggcctgcagcaggagtttctggacgcgcttgacggcgctcatgaatggcgtagtcttagacacatagacaatcttaggtactaatgcgccagcatatggggatgcgactggggcatgaggtataggacgcttctcgactttggcatctgttatccaaaagtcagcagttgtgatccccggttctcagcattggccgtttaggcgatcggatgggaaggcgcacgttttgggagtctaataaggtctttgttctttttctcaaactggagcttgctttccaatagcccctttgccatggctaatatatgccttgcacgaatgaaaatttgcaaaatcaagtcgaagtattagagctgcacgtcttatcgtctgcctttttctgccggccgcccagggtgtgtgatctgcttatgtcatcgcctgttgaacctgcctaattgggaattgggaagctacaactaggtatttctccaaagtagatcggcaaactgtatgatacctaattaggtagcaccttctcactaatttgatatcagtagcctgatcatccacataattatgtagctctatgcacttgttgatgtacttgagtgtaaaggagaaaacctagcgattcgcttcggaaggcccgcggtgtgctgcagaccggtgatgttccgtatactttctactttcgattgaaagggaagtaaggttgacttgaaagcctactccacattcctgagccgcattaaagacgttggcttaagttatgtacatactgtactcaactgttaccatgatccaaacgccccgactcctgtcaggttcttttttcactaagctagcaggcctactgtccagcactgggcccgggtatggggtcattgagcaatactttgtgtttggcagggtggacctaagtacggagtacaggcatggtcatctatttgggtgggccagaagtccttttgatcggatggagttttcaggtgccggaacacgccttatcgcctagtaatacctacaccggcttgttgcgtttcggagagaagatattagctcataaccacactccgtaattcaagagactagtgggcagtggactgcagatctcgaacggcgatgagcagtgtgatctttgttatgattctgaatggggcttctaaccaggtgatcctggtctctcggtttatgtgactatccgtatggagcacacgcatcgagaatgctcagtcaaggcctattcagattaagggcgattgatgtgtaaaggggtactttttcccactccggactccgtcctatatagtttaaagtggagaacatcgatatgaacaggcagttccttctatattgtagatacccaaggggccgcttgggcatctcgtccaatatttaaggaatggctttgataggtgttccgtacattctagttgatcaaagcaccgttgcggcatcttatgtatgtaggtatcgaggcaaagagggtccaaagtgtctgttgacccgagtattcggtagctggttctcgcaatatccatatcttggacggagtaaggagtagggtacggagcactccgtactccatatagagtacaataagggcgatcaccacgtgagcccccgatggtctggcaaattttcccctgaggctggtcaacatatggagtacggattacggtataacatcgaatgtgaaccaaggcgttgacgatcaacacatctaggcttgatggatcgacatacacctcgagctgaaagctgggcagtgatgtacaccaaactagtttgggaaggtcgccaaattggcgggctggtgggtcaactgggcagtgttaatttgtttcgcctgtttcaatgatgaaagttagatcatgtgcatatttgatgtttgatcttcacttttaagaatcccaagtatcaaattgagttgatgtagcaaatcctgaaggttggaaagtggacctacggagtatcatcggcgaacaaaaaacgccttagactagtatgccttaggcacttactgacagtagtatcgtagtcaggttactgtggaagaccataggtaatgtctattaactccggctgtctgcagatgaatgattgacttaaaagcactgaggatattctagctcttgtatatataaaatttgctttatcccatgtgactgctccaacggctcctttttcgagtgcccaatgcaacggtcacaagtgggttcatcaccagggatatatatgaacacaatatagaagttgcaggtatacatactccatattgtgtatgtactatatccaggggcccataggcgatcgaagccaacacaatcgtaactgttcatcggatctacgtattatgaattgaagggttgaaaatagatagggcgacaggatggttcatgctgtactataataataatggacactcatgggtacagagaaaaaaatagtctgtgtatgttgtttttagattttcacaaaggtacgtggccaacatgagccacaatctggaaagatctgcttgcagtgcatggtagacataagctgagggtaatacatagctgacacggaggcaaatttccgagaaatcgcctcttctaaactgacctgtcgccttctgcataaagaacattacactgcactggtgaatatgacagagccaaaatatttggtaggcgtaacggctcccccagttcccggtcacaacgttagggttccgcgtgcactggagccttaaatgcaagacagcactagtcgtctccggaaaggcacgggggatgataatccaatcataaatgtgagctaggctctttggcttggaacctacctgaagaggaaaggtgttcaacgtaggctagtggggtcaacggctgtctctgaagcattccacgccaatggtaaaccataggaatcggagctaatgacatgttccagcgggtcggtgcaggtggagtagctttaaaaaaacagaatccatggatctggactcggatagggaggggtttgtcttagttaaattgattaaattatgggtttcattgatttaaacaaagaaaaataataaataaaaataaatcacacgcaaagaaaaaagaaaaacaatttaaatgattaatgtaaataaataaaaaaatcaataaatcatttaaacaatttggatttccagattttgattctcgcggacttttgcgctcgagtgcgtctccaccttgtagaatggtccagccaaagggcagcagctcgcgcctttttgtatgggactgttcccctccaccgaactattttgaactcttcctcctcaactctccttgacttccctctacattcacttggtctcatattcccagccactttggtcctttctctgtttaacgttctctactcgatccttgaagggagttaagacgtgtctcacgtttcagccggaagctagccattgaagccgctttcttgcgtttttttgcatacatcagatctggcgtgcaggagatccaacagatcccgtgtcgtgattggtttatttctcaagggatatcctagagacaaaagtactcgctagtcgcaaaagctttttctttctttgttggcctccttgtaccccagggctgatccgaccaaccgggtcccctccatcagtcttctattcctctttgggcctatcaggtctccagctaccccttgacggcctttgagctatcccagccgctacgactcataaatatcgctcttttggccactggactcgcattcgtttcttctctcttcctatcttatccctaaaacactttttcttgtcccgacaccagtccttcaaaatattcatagcatgtctccagacccttactatgagacattggatgcacccgacgggacagcattgacgtggatctttgatcattgcttgcgttacgctgacagctacgaaatttcccttcgtgctgcatacgaactcaattgccacccgtcgaagagcacaatgacaccttcatttattcctcgatcaccctccatcttccgcgataccgtttggtccaaaaaaggccacaactccaagtcttctgtcgatgctccttcttatgacactaatgccgaattccgtgcctgtttgagcaagactgtcgccgaagtgccttctcaaccttgcgcgctccctcccagcttcattatctcatttgtgcgccgctgtttctgtttggatttgtccgaagtcgactttgcccaggctttgactgcccttgattacatcagaaccctccaaaatcgctggaaaaaggagattgatgccgccttcaaccgactcaacgtaacttcagaggatgcaagggaccctgagcactcggaggtggctcgcaattatcctaacttgttgacctggtacgaaaacatcagcaacaaggcacgcacgatcgattttctgtacactcaagtctatatcggcctgcgtcgctgggtaagttttatcccgagatcggaatagcgagttgtgtgtctaacgtttgtttctcaggttcttgtcaatcagatgatgctcgagccattcgacaaagccaactgccttgctcttcttaacactctactcccacctgtccaccgagacagctctaccccaacacagcagttgtcgactgccacccttgggctctatcgtgatacctttttcaaatacattaccacctttgaggctgatccttcaatcgtggaacctatcatacagcaaggcgctgcacccggtgatgagaatggatggcctgcattgcatgccaccattgagcgatacatgaacgcagccctcgagatgatcgacgaatgtgtcttgatcaacgagccttgtcagattaccaagtctggcgtgcagcgccgcaccgattcgggtatcagcttcggcgtcgatttcggtccctgtcctactatttcgcactcttcagacaccgaaaagcccctgcctcatttcccggaaccgaccataggcactagcaagcatggttcgttcctggaacgattttcctccctgtcagcatggggcaagaagaaggatcccaagaaggatcagcagaaggagtttgcgcgcagtctgaagaagatgcaatccctcggaaaactcactagtccgactagcagcgccaagagcagcactaagagcatcaagagcgtcaagacaccaccaaagttcaaggcaaatatatctttcgatttgaccgaagacaagcgccggcgtttgattgatgaagcccaagctcgcaaggcagtcggcgctactgaggcggccgaaagcatcggccaggccacttaatcgcaacttctctgcaactcctaccaaagcaaaccagcaaccaaaaaaaaaaaaaaaaaagaaaagaaaaacccaaagcccagccaagggaggggaatcaacgtcccctccctttccccttgatttctagcactcgactcggtcatcccttactcttctttcatcctcgctgcagtcgcccccctgcaagcacaaaaccgagagggagcattcgcttccaactatgccaatgctaggcctctgttgtgcagagccagcctggctgcacttgtgtgacttaccttagtatgtttcggaacaaaaaaaaaggcgtttggacggaaagcatatgggggtggatttacgacttaatgtcttcacgatagcgtccagttcactggatttgaaacaattattattacctttatctttatcattctccctcccatctctcatccagtagatatagatacacataggatcttactactgtagccaatgcgatacaacgcggggtagaatatgtagtcgccatctaggtatactcggggattgggggttgcgccagttgccgctcagtccgccgtagaagctgcgataagatagcgaaacttcccaagtgtccagatcagatcagcagattcattctcgatctcactgccgtctttgttgagatccctggttatttggggcgtgatgattgtaaatggattgacctgcatatctgctaattaggaagcccaccctacatcacatacggctcgcctgatacgaggctatcccctataccatacaacagatatacacaactgccttctcacactacattgcgcgataatgagggttcctacgggatctcacattccctggcagtggtatgccgtcgtcggagctctgctaccaggctgggttgccaatgctagtccagccgtgaacgtggcgctccaagcctcctttgactcggccccatacctcgtcgagctcctgtacgttgcacattgagtgatctctcgcctgggatatatatgtcaatatgatggctaattaattcaatgtagggagtctgctgcagaagaaaactccaccgcctattttcctttgttggatcgcatcgccgatgggacgtttgagaacctcacaactgagaaggagctctacgaccgcttcttgacagttgtgaaggatgacggccatattcggactccggagggtctttcctcgttcaaattatcgctttcggtccgatcatcggcgcctcgtattgaggcgcacttccagttctataacacctcagttcagcagtccttgatggtggctcaagatgcggtgtgtcccgtgtgggttcactcggaaggaaagcagtattgctcttctaccatggagcgcgcacagcaggacgttgtcggagaattgtgggtagagctttgttcgtgtcgcatggactctaatagctgacattgaatttgtgcctttagggatcctagagagctaccgtttgatcgtgtcctaggcgatgcatcgctccctccggccgttctgtacgcagatatcacctctccgatgttcagagattttcatgaaaccctgagcgacatggcaaaacagggacaagtctcgtaccgtgtacgctatagacctccccaacactggatttctcgtcccttgtttgtgtctggatacggcgtggagcttgctttgaagcgaacggactacattgttattgatgaccgtgatgcagagcagctcgaagaaaagggcgcccaaagtcttccaactgacccggatgagaccaaggaagatgctccaggtgacctccggcctctgtcttcctccgatgtgacccgtctaggcttgaactctgcgggctacgttatggacagcgctgatcctttgggaacattgatcaagatgtcccaaaatttccccaagtattcatcgatagtagctgcccacaattccactggggaaatggcacaagagatccgccacaaccggttaaaaatgctccctggtggttacaatgccatgtggatcaacggtgtgcagatggacaaacaacagattgacgcattctcacttattgaacatcttcgccgagagaggaaattgattgagaaattccgcggcctcggtctctctgcggatgatgtcgtgaagttactgtcacatcggctcctcactgaagctcaagctagtggcgaggagcaacggtatgactaccgggataatttagaagggaaccaggttatcatttggatgaacaatctggaaaaggactcgagatatgagtcctggcgtggtgatatcgagggggttcgtacttatttcgtatggctattggacggaattcatattaacataattctagtacatcgccggctcttacccgggacaattgcctccggtgagccgggatctgcacaatgtcgttgtttctatggactcgtctaatccagaacacatgatgcttgttgctggaaacttgcacgccttcatcaaccgaggaattcctgtgagattcggcttggtacctaccatctcgtcgccagagtccattgcgcagctgaaggtagcgcattacctttctgatgcatatggcatagagtctcttgtgcaatatttccaagaatatgccgcgaaaggcaaaatgggcttcccagacaaatcatgcttccagtctgcgactagagaacgcgacctggttgacgaacacgaagctctgtctcttgatcaagtcttgaagagtgaaaagtatgacgctgtggtgtcccaaactggtgcttaccagcgtcggttgagtctgacgggcgacgcacctcaatttctagtgaacggtatccctgtctcccgagaaggcaactggatgcagggaatgagcgtacagatcagcaaggacttgaaattgatccagcaaggcattgttcagggaattttcgaggaggacacatggcttccggagtttttcctagctgacgcattcgcgaaacgcaatactttcctcatgcccgaggatcccaagagtgtacagattgtggacatcggtaatattcttgcctcggatgaagatgcattgagtaagactcgtgttctctcagacaagggagccctagagagcactcatatgatagttgtgggcgatttcgagtcagaggcgggtgtgaaactacttaccgatgctcttaatcttcgaaaggagaacagtgacgtggagattctgatgctgcacaatgcggcatcggacgccgaggatgatgcccccaagaatctcgctactctctatctctcgcttgcgaaggaggaaactatcgaccaagtactggctaagattgcatccggtaatctcgagactgaagtccaagatatctctaccattcaaactttgcaccaaatcctggccaaagaacttggattcaaccctggcaccgagggacttgttgtcaatgggagagcagtcggccctattgagaaggaacatccgttgagtgtgggagagatgagccaactgattgcctacgaacgggtgaaacgcctcgattctgttgcggcggctgttgaggaactcggattcgcggataagatttcaaacccgctcgatttcgctaaattgacatcgcttgtggctctttccaccatctctgatgtccctgagggcattttcgaaaatactcctgatttcagaatggacgtctccggtaaatggaggacggagcactctgttatcaccatttccaactccgatgatcccacgattcacgttggtgttagccttgacccagcatccgaggttgcccagcgatggtcgccgattctgaaggtactgtccgaactctccggcgttcaactgaagattttcttgaacccgaaggaagagctcacggagctgccagtcaagcgattctaccgctatgtcttggaatcagagccatctttcacggataagggggctctggctcggccgcaggcgtcattcactggcgtgccagtcgaagcactgctgactttgagcatggatgtgccgtcatcttggctcgtagcacccagtgaatcagtctacgacctggataacattaagttgagctcggtcaagtctggtactgatgttgatgccgtctacgctctcgagcacattctgatcgagggccactctcgtgatcttacaacgaagactccacctagaggtgtccagcttatcttgggcactgagaacaacccctatttcgccgatactatcatcatggccaacctgggatacttccagttcaaggcacagccaggcttgtggcagatcaacttgaagcccggacgtagcgagaagatcttcaagatcgatagcgttggtggtctaggatacaatccgcagagcggtgacgagaacaatgaggttgctctgctatccttccatggtcggacgctattccctcgactgtcgcgaaagccaggccacgaggaagacgatgttctcgagacaggagtccagctaggctcaaagatggactattttgccaaaggactcaactttgcatctgacgtcctctccagtgttggtgtcgggtccaagagcggaggcgaacagcacgccgatatcaacatcttctcagtagctagtggacacctctatgagcgcatgttaaacatcatgatggtctcagtgatgcgacacaccaaacacaccgtcaaattctggttcatcgagcaattcctctccccatccttccgcgccttcctcccttctctcgcccgcgaatacggcttctcatatgagatggtaacatacaagtggccgcactggctgcgcgcccagaaagaaaagcaacgcgagatctgggggtacaagattctcttcctggatgtgctctttcccctctccctggacaaagtaatcttcgtcgacgcggatcagattgtgcgcaccgacatgtacgaacttgtcacccacgacctccaagaagcgccctacggcttcacgccgatgggcgattctcgaaccgaaatggaaggcttccgcttctggaaacaaggatactggtccaccttcctccgaggcaagccttaccacatctcggcgctgtacgtcgtcgacttgaaccgcttccgcgcgcttgctgctggcgaccgtctgcgcggccaataccagatgctctcatcggatccaaacagtctcagcaatctcgaccaggacctgcccaaccacatgcagcatcacattcccatccatagtctgccgcaggagtggctttggtgtgagacttggtgttcggatgaagatttaggtgtggcgaagactattgacctttgtaacaatcctcttactaaggagcctaagctagagagggctaggaggcaggttcctgaatggacggtctatgacgatgagattggggctttggcgagtcgcgttgctggcgagcaggctgctgctggggttgagtttgtgcagactggcgaggaccgcaaagatgaattatagttgacccggtgggtttcattggagagcgattgcatttatgattacacttgttgcatttattggattgaatagtcaatctccgttacatttttatggaagatttcttctactgcatgctctcataagaattgacatcctagcaaacaagtgtataattgaatctagaaagcaagcaatagcaaaggcaaaatcttcatttcatgaagtttcacagctcttccgagtcactctcgtacttgaagtaaacttcgctgtcctcatctccgccgtctgagtcatattcatcgtcgacagcatcagcaccgtgagaaacaggtgatgtgggcaatgggaatgcttcgacaacagaatgagagggcttgaccaaagaggtagggctgccaatggaagcttgtttctgcttcttggactttttcttctccttaggggattcattactgccagatacctggttagcctcctcggcagcgagacgttcctcttctaatatctttcgcttcttcttctcctccctcctcttccacttttgctctttgcgtgcggccttgtcttccgggacttcttgctcaatctgctctcccttttctttctcttgcctcttcttctctcgttgctccttcttctcgcgtttcctctccttcctctccttcttctcgcgcttcctctcctccttgctcttttggggggcgccgggagaggacggggctttctcgatgggaccggacgcggaatcttcattgtgcttgcgcttaaattttgacttcatatcatttttgagaggtgcgggcaagttgggctcaccctctttagactgcgcttcgtggtcagactcggcattggcattgacaatggaagatggtgctgcctcatcatggggctttgagctcggggtggtagttatcatgtcttcgtcgtcatcagtatcctcgttcacgaattgagagctcttcctttgcgtctccaatctcatgttccagtgggcacttttcttagcagcgagtttgggatcgaacaccgcgtctggctggccattggcccgcaggaccatgacctgtttcacgatcttgcgccatttgtctgcacattgttgtcgagaccgcacataaccaatctccttgctaatgttaccccatacaatgaggcgctcatccagctcgtacatgtccttgcctgccttatcgggaagcattggcttcatggtgacccacgtcgattccacggcgtcaaggaacatcttgtgttcttcctccgaccacgcaccttggttcatggtgttctggtgctcgagcttgttcttccagcgctgagtgacatcgtcatcactgcgcccaatgagcttaccaatgaaagtccatttcggaccgtgttgggcgtggagctcgataagctcatcatcttgttccttcgaccattcgtgtgccctttgagccgaagcttggaagtgtcgacgcatgaatcggtatacagatcgccgatcacgatccggaagaagagcgtagatctcgtcccaaaagtcgcctttgaggatgccatatgagaagaatggagattcgacgcttaattcacgggtacgctcagaatgctgaaccatctcgtcgaatttggcactaggaatgccatgcatggtacagacattgactttgtacgcttcgatttttcgcacttcatccggcgtatagaagccaattttcaagttgtccctctccctaatgcgcgagcttctaactcccttggtcttgcctcctggcgtgttgctatcctcagtgttgggcgagtcaggggctggagttcgcttggtggcagccagctgctttacagcggacggtccttctgcaaccgttgattcgagagtaggttgagcagtggatgaagtgaggatattcaagtttttgccattctgcttgcgaaccttctttgacgaagacttaggctttgatgtagtgggttggctgggagtgggggcattgtgaatagcaatttcaaagcgggttgagcttctttctggtgaaggtgactcggcaacggacttttctgatttgcgaggcttcttgatcttttttttgcgctcaggttcagagtcgcgctttcgctttgaaggattcgacatgttcgagtctaattctgagaggcgctctgtaccataggctttcccaattactggagataatgcttcggtttctgatgatatgtgttccttattatttttcttcgtcccgccaaccttggggggattgggagtttcagggactgtcagattgcaaattttagtaccgagtcgcgtgaagatcaagtgatttcaccaaccgatatctccaaaatcgtcagcaatttcagggtatggttcgagctgagaagatgtatttcccatggcaatgagctgcaacaatgagtagggaggggggaagattagctgctgcaatgaaaaggagagaccaagcttcttcaaaatttacagcatgcagcgcggcaattgggttcaccgctgaagctgaccgcctatgtggaactatatcaattgctacagtacaattgtcgatggttgtaggagaacaatagaatcacaacgaagaaaggacttgagactaagataacatttgctaaaaatataaagcagaattattaaacagtcccaaataatggctggccattgtacaactttacggagactcatgtattccatacagtgttgcataacaaatctattatgtattcagacattgagcattcgttgaacacagtgctggcaggtatcatgctcatgattgcattaatagtgtacatgctggcataaagaacataagaagcaaatgcaagtcgtgaaaccaatactctaggtcctactgacacagtcaggacacgagcttcatatcccttaggattgtcatcactagtttcttttggtcatgagtgtgaagattttgttgatcggtctcctgtagacagcgcccaattgcaacagtgaccttgacagcactttctgcagcgatagagcagtccacccacacctttccattgcggccaactgcaatctcaaatcctcccaagctctccagcttctttccaagttcagaaagaacagccagcccttcaattgcatccgtgttctcggcagaagtggagcttgctcgaatcaaccgggccgccataccagttgaaacatcaaataccattccacctgtcaagggtcccaatcctccatcagccttgccagttgctgggttgacacaggtgagttcaacttcggcgccggcaccgagtcccacggactgtacccgggcatacaccagctcgccttgcttcaacattggccttgtcttcttggatgcgccctcaaaggacagctgacccagaagcgcgtgagccgtgtgtggagttaccatgcagtgaaagaaatcaacgctggagtggtggatctgagcaatgacgaagtcgttgacggtgggaatgtatcggcgattcgggaaagaaagaagcgagacggtgtttcgtttcgcatcggtcgtcaacagaccggcctgtgttgctgttaagacatgattggacccatttgaagagggctgtgataggatacggaggccggggcctagtcgtagagggttggagttgttggtaggaagatggtcttgaggtacctcatcgctaggtaataggacaagggcagtcatgatgctagactgatagctgtattctgaaaatatcctcagtgtagaatactccgagggaagaggatcaatgcttattgctgaatttctctcaggcagtctcaggtagatagatgcgactgcttttgcgcattgatcctgttggaaagaaaacgacatttcttatcaccatgtgacctcaatgaatgcccgcgatgccttatcgacaacgccacaaccactatcgataactattagccacatttgcggcagacgaaaatcttcaaaaatctttttcgatcgttccccctcaatcgagatttccaccaattacctccgatacccccggatctactctcacgccgtaacgtgagatccttgttctttcaatccaaaaaagtacatatttacaacttcgacatgggtgacgctgccaacagtgcgcccgctgaggctgagcgctttgctatcggtatctcctttggtaactcatgcagttcgattgcccgtatctcgcctgtacgtcctgatattcattctttgggtcaaataactgtgactgacacatttataggagggcaaggctgaggttattgccaacgaggagggaggtgaggacaatcaagccccacgatttgagaatttgaattaacatactcagatcgtcaaattccttccattctttcttatatcgacggcgaggagtaccacggcacacaagccaaggcccagcttgttcgtaactccgccaacaccgtcgcatacttccgcgatttcctcggcaaggaattcaagtcgatcgaccctactccctgccaccagtcggcccacccccagcagcagggctcgactatcgcgttcaccatccgcgacacctcgagcgagacccctaacactgtcactgtttccgagatcaccacccgtcacttccagcgtctgagacgctccgcctcagactaccttggtaaggatgtcaacgccgccgttatcaccatccccaccgatttcaccgatgcccagcgtgaggcccttgttgcctccgctaaggctgctggtctcgacgttctccaactgatccatgagcccgttgccgctgtcgtggcttacgatgctcgccccgaggcgactgttgtcgacaagctggttgtcgttgctgacttcggtggcacccgttccgatgttgccgttgttgcctgccgcggtggcatgtacactattttggctactgcccacgactacgagcttggtggtgcctccctggataagatcatcattgaccacttcgccaaggagttcatgaagaagcacaagactgacccccgcgaaaacgctcgtggtctggccaagttgaagcttgagtgtgaggccacccgcaaggccctcagcctgagcagcaacgctcagctgagcattgagtccctggttgacggtgttgactacggttctaccattaaccgtacccgtttcgagcttctttccggcaaggtcttcagccaattcactgctctgatcgagcaggttgttaagaaggccgagctcgacgtccttgacattgatgaggtcattttctcaggcggtgtttcccacacccccaagctcgccagcctggccagcaacatcttccccgagaagaccaaaatcctggctcccgccacctctgtcactgccgttaatccctccgagctgtctgctcgtggagccgccttccaggcttccctcgtccaggagttcgaccacgaggacatcgagcagtccatccaccctatggtcactgtcacccctcacctaactaaggctatcggtgtcgaattcacctcccagaccgagactaccttccagcccctcctcggcgccgagactgccctccccgcccgccgcatcgctcagtacctcgcccccaaggagggtggcgatgttcttgtccgcgtgtgcgagggtgcccgtgagatcaaggtcaccaagcctgagcccaaggctaaggaggacaagcccgcccaagacgaggatgactccgatttcgattccgaggatgaagaggaagaggagacccgcgagatcatctggaagaccgagaatcccgttgctgagctcgccgtcaagggtgtcaaggctggcagcaagatcgaggtcatggtccacgtcaacgccgatcttggtctgcagatcgccgtccgcgaggtcggctcccagaacgctgtccgtggtgccgtcaacggctccgcttaggttttttttcctcgtgaaataaaaataaaaatgttggatttcgtttatggtgtgatgatgcatgcatgactgatatagaggctgtgatttttctttttgtccacgatttgtactgcagttatcgtcatggagtctttccctttattagttcttaaatagactcagttatatgcaaccaatcaatactggttctcttttcagccagcttcactctgctaggccctattcatttctgacgtatcagtcgacatttctccttctgctctacaaggaataatcattgagactagctttgctccaaagcgtggttacacaagaatccaagctatatgactttataccatttacatcgcaaagatcatcaaataacggtggtagatattatattacaactagattagataggttcgcaaccgaaagcacaaattcctgcatgatcttcaaatcggggagaatcatcgaaccatgggattcatcaacagatcatcaaaggctcgagtgccttagaaaacataaccggactcaaggcagggagagtatggcgcgaagaatgctcaattgccatcttatacaggaaggccgtagatttatcatgtggtaaagatcgtgaggggttcgtgatagcattaagcgagtgtgggtggttcgatcttccaggctgcatccgggtctatcagatgcagattgacaagatcgaagtgtaacaagcggcctcctgaagaaagaataaactctcaaaggggatatcaacgcgggaatacaaagtcgtgtgtgaaatggtccagagatcgacgttttgaagtcgacattttcaggtgctccggctcgttgtcgaaatgaggaagcgggcttttcatggcttgaggtatatccatttaagcgaagctggtgccctccttcttctggcttttcacgctgtttgagcgctgcgaggagaagaaaccacggcggcgctccttgcgtccactgtatccaccgctggtatcttttcggccgacggcaccaccgaggcagtacatcaagcatgaaaggaactggcaaacggatgcggtccacatgaaggcgaatgccttgacaccgaggtgtgcgtcctggccgttactcttgaacgcatggcggccctggacaaagacagcactatgaaatatagttagcattttgtctttgggacaaactaagttccgattatagtgatacatacgtcatgagacaggtcgtgatgacctggaaagtcaaaccgatccaggccaggaaaccggagaggtagctggcaatgcgggtgcacatggccagcataccagtgaagaaagagcacacggcgaagaacagaccgatgatgatgaaggggaacatgaagcgcgacatcaagaagtagtgcttcgatctatagcgcgcgtatgtatggttagcgcgacccggtaaattaggatatatcagttggaaacctacccgacaaactgatgagggatattttcggtcgtattaaagttacgatggcttggggggtcgaatgggaaatccacatgggtctctccgcagtcactcctgccgttggtcactccacagaggttccagaatgtccatcgcgaggtcgatgctgcgcctgggatatttcccgtgtctgcctcgaggaagtagatttggttcagcgggttgctgttgcgtacacctcccaacagagtgaggaagatcagcaagatcgctcctgccatgaaaaacaggcccgtaaagcccaatgttgctcctagagacgacgatcagattaaggtgttgtagagttgttaatcaggggtcaatcaacttactgctgaaacccattttgtttggcgcttattatagatcacctgggaattgaggggcttttttttcttttcgaaggtttgtctctggtctcaaaaaagaatgagttgctcaaggagagtgtcaagatatgaaagagaaggtgtcagaaattgaagcgacaaacgctagctggtatatggatacatataagagcagccggggtatccgggaccacttgagtagtgtgatataatgacgagtgggcatcatcctgctctcctcttctctctacaaagctcaagcccatcgacgatcataacgtcatggttgcacctgatagactagccgttcctagttagcttgcactatacttcccgcgctagaccagatcgggttagtctcaggcggtccatgacgaggtcaacaaccaaccgacgttgcacctctcgcaacaacattggccctttggaaggaaagtgacgtggaccatcgtggaccatcacatatgaaccttccaagatttcggtcttacccactcctgtgccttaacgaaaaaaaaaaaaccttgtctgcccaacccaatccccagactcgaccaagggtacacactgcgtacctcccaacccgtacaacgttgtaatggcgacctgggcatacccgccactgcccgcagagcagatcaaccgtgaggcggacactgcgctggtatgtaaaacaatatatggacccctacaacaggcgatctcttcatggaggcctggttggctgtagctatgatccatgaaggagtgtggagcccttttagtataatgccaacaacgtcttatcttaggcccgagagctagaatggctattgcattcgctgcaggattcacttgcttcattgaaggaaggtctgcaagaatgcgtcgccctcctagctccccaagaaccggggtcaaccttggtgctgtcctccttgcggtcggaaagtgtcaagggcttcgtgactagagtcggcaccaaggtcgtgaagggggtatgtatcttgagtgtggggaagaccaatgaatatgcaactaaaccgatatccttctaggatgttcaacttcgacttgcatcgctcccgcctcctcggggtgcccccagcacccggctgaacatatcccagtcccctggagctccggaactcgtacttcgacagctggtatcggttcgagatctcgtggctcagagcctggatattgtggatgtgagcacgtggacaggcgatcccctcaacgctggcttcattttcagtcaactacaccttttgctcgagacaatcagcgaggcgcgacaaatgttgaaaggagaaagcgacgagacgcgaggcaagtggtgggataccagtgccaccgaagatgtatgttcgatttctttgacagaagtacttcgatatttttgctgatatatatactacacagatgtttgaccctccgcttccgccgcatctttctttctatctctccatcacagactccgccctggtccttgtccttcggacactggagcccactgccctcaatcacgcgccaaccgctttttcctcggatatctctctgaccgggttctcgctacgagatcggatattcggttcgcgagcgccaacccatgatgaggccggtagcatttttcaatggcagggagaagaagttcgtgtcaaggagaaggtgcgggtggagagccaagatcccagtctgatggcggtcatggcgaaactatcggcccttgagcatgaggtgatgcggtgcgttgctgcgctgcgggtgctcatgggcgatgaagatacagagagcgaggcctagttatttgattgataccctactgcatttggattatgaacagctgcttgttgcaacacttgattcattcagtattcgagttagggcctttcgaagtattgaatgggctgtagtttgagatatgtttttagcggccaccttaaggcttcctagggctaggactttgttagcatgccgtatgaaataaatgataccaaaagcacccagcaatataaccgcatattcctaaatatgtaccaacaaaaaaaaaaaaaaatcatccttggatgttatagatctttgataggtaccgagctacatagaacgcgaccgggggaccagccaatgagaggcccgcagtttgtgatgggcccgcatgaccatcttggcatctttttttaggcttggccattttctttttttcttctctcaacctctcgaaaagggactgtcgacaagagttggaaaatgttatcctggtcttcagcatcaggcgctagtcggtcgcaatcgcgcgaactatttcacaccttttctcgcccttctggatcgcgacagctccgcggacctgccaaccgtgtgatacctacaccgcaacgcactttcatccagaaatcgtcgcctttggtcgcgtctagcagtttggcgcaccgaaggaacacatcagcacaatgtcagcctcagcggaggtttttgtcaggcccagtatccgccgacttgccacctcaacccagccaatccaccgaaccagatgatatcaatatcctaatcgatcgaatcggcgaaaatgaggcagaaatggtacaaatactcgaagagctggaaattatgggagaagagggcgaaagagacgagctcatggacctgatcgcccagcgagacgaacacactgcagagtcgtgggtacacatgattaaacagcgctttggagatgaaatgccagaggggttgttggacgatgctgagctccagatatacgcccgcctctacggagaaccaattattcgacgggaagtcgaggaaacggttgaggaagaggaagatctgagcttgctccgcgaagatgggcaaggaggatgggaggaagtcgatttagaaggaaacgctgtcgccgaggacgaggccccactcgtctatgatatggacttttccccggaagagcgggaaacacttgccatgcagcggaccagagaagtggcagagcagttgggcggcgaggtcatgctcgaggaatttgagaacgaggcagttcctgactccgctccaagaatgcatccactcaccctcgagggaaaatacggaactgatccttcaactatccatctgccccaggatactgtcactggtcccatatcggtaattctatcggaattctccaacaagcacatttccgagactgctcggcgcctgtttggaggaccaggattgccccattcgagtacaacggcacctccacgtgcccaattaccacagcttcctgtcgctcttcaggcttcgcagcgtcaaatgggagaaatggaggccaacgcatacttggcagccctgtaccctgggatctacgcatcgaccctcagtgttatggttgagattcgcaagcgattgggcgtcgattggatccgccgtcttatcgctcaagagggtgggccaaacgttcttgatgccaacggtggtggtgccggcatcctggcctggagagacatcatccgcgcagaatgggagctcatggtgcccgatcatcccgcgggagcacccatcccatttgggagatcaactgtgctgacaggctccgatgctcttcggctgcgcgcttctgccatcctggaaaacacgactttcctcccacgactacctgattacgtccatgtgcgcgggaagcctacaattgacgactcgcggaaggcccctaaacgcaagcagtacgatatcatcatcgcaccacactctcttctcggccttgaagaagaatatgagcgtaaacagcacgtggagaacctatggtctcttttgaaccccaacgggggtattttaattctgctcgagaagggccgccagaagggcttcgaggctatctctggcgctcgtgaaatgctcttgaagcgccatatcgcaagccccggctctaccgaatttgacaacttcctcgaagaccccgaccaacgcgaggtcattgagaaggagcgcggaatgatcgtggccccttgcaccaaccactcaacctgcccgatgcacaattctgcaggtgctactaagggtcgtagggactactgccatttcgagcagcgatacattcgccctccattcctgcagcgcataatgggagcgaaagaccgcaaccacgaagatcttaaattcagctacctcgccgtgcagcgtggcgtagacctacgacaagagcaagcaattcgtcaagattcccaggctacagatgccgcatttgaagggtttgaggaccctgaggagtctgatatccctaacaaaccagccttccacgctctgtctcttccccgcgccatttacccacccatgaaacgccgcggccatgtcatcttcgatctctgcacacccgccggcaaaattgagcgctggaccgttccgcgctcttacagtcgccaggcctaccgcgacgcccgcaagtctcattggggagacctgtgggccctgggagccaaaacccgcatcccgcgcaacctgaaccttggcgataagcatggtgagggtaagaaggagcgtctggcccgccgtgtggcgaccaagaattctatgcgtgacgcagaggaagagggtgactttgagaatgaaggagaggaggaggaggatgaagactatacagttgatgactcggatattcctgatgtccctgtcaaaaagaggggccagcatatccccagttggaagaagcataatgataaaaagaagcttcgtcaagtgtacaacaagcgttctgccgacgaataagtggctttgatttggcgcaattctttttttggggtttggatgttcgaaaacatgtactatactaactactggcagcatttggcattgggacggggggcggattggatcttgtttgtacactaggatattattctcacttctacagatgtaaatatagcatcttcactctaatcaatgtttgataggtatctgataggcgtcatttagcccagagttaatttccctctccaatgagacggttggggagacggttgggcattccattaagtcggtcgtaatgaagcaaagtcttgtcacgacctgggggaactgagccaggcccaagaagcgccggtagtcacagaaaccttgtctaagctctgcaatgcacaggccgttctttaaaatgcaccgggcgcgcggggcattgatgttctgagaaagacagccgctggcttcatgcttggtactgttctagccagagctggcgcaccatccacagtcaggaatgacatggatagaaatcaaatgaaagtcaggttggagccaaatcctactgacaagctagtcggttttcgtaatagcagatattcctatctcgcaaagtgacaccgccacattcactgcgctgccatactctttcgcaactgcctttgcttctgtgtgctttgcaactccaatcgatcgactgcaaatttgagccgttctttcttctgcacgagtcttctcagctctgctgccttggatgctgctgcattacccgacgagccagcgctggaccccaccatgcgaccccgcagtgagctgctttgaggttggctgcgagtagctgatgaccggctctccggggtagacgagagtcgaccttcttgaagatcgcatttcgccttgaggccttgttcgcggcgcgcgagcttttcaacatggttcgatgatagtgtgaggaggtgggcgatgctgggagtgatttcgtcaaggagggattgctgcgcttcgcgtaatgtaggctccgggaggagttcaaagtgctattcaaagacaaatggttagacttatagcttcttgtttctcctcttggatgacaccttgggagagcatactcgagttgtctggaggactttacataaacgagggaaatcgttcacgcccgcatcgagggtggatatagagttgtccaagatctggagagaggatcgtaatgaggtaaccgaggaagacaatgaagctgccatagtgtgtgatttgaagctcagtttggagatggttgtttacagtggtcgggatagatcgggctgtaaaagcggcatgacaccgcctttaaggcggcgtggcctcgggaccgggcaaacctcccaaacctcacttctcctcttccgtcctcctgcctcaccatcttcccgaacgccgaattctccccgcattcgattcacctgtcaaaatgtctctcctcggaaagaagttccccggcgctctcggtatgtgttttttggaccacgatcatgacttgtccgagaacgatatgaggaccattgactgacgcatatgctcttttacagccacacctatgactcccttcttcgctgccggtatgcatgcccttgaaaatccgaaattccctgaaaatccgcaacgcatggattgccaattaagaacactgcaccctttcagcagtcattgatggaacattactctgacgattctcctctccaggcctcattgtgctctacggtgtcaactctctccagaacgctctgtccaacagtgagtccactccgcacggctattcatagatgacgacgattttgcggtcacatgcgacaatatccacaaaacaacgctatgatgagcatctgcgagcatcagctactaaccttcatatccgtacagccgctcagtacaagaacgacccccgcaacgtcaacgctaagcccgctggcaaggctgaccactaaattgggtcgacaatgaatgcattttgagatcccacttgttcgttgaagaggagcgggacgaaccgtcgcgatgtgtgggcggacggagatggcctaggtcatcaatggccggcttgcactttttgtgattactctgcgagcagttttcccctgttcaagcatatagagtgtacccacttcgattggggtgacttggatcaattcacaaactgtaccagtaccgttctgagcaaggcgccttttccttttgtagtgtctcttctgctggatgatatcctatatttcagagcaaggaaagtaacctaagccgaatattccggagcctgttgtattgcaggtaaagctatagggtttggaccgtatacttcatatctgctcattgcggcgctatctcacttagggctagtttttcacttctttgcgaccgcgcaataagtcgaaattagcccttattcaatgctttgtcatttgattccaattgtaacagctgactatccctagtactagttagtagggctttgataccgctctcttgtatcaaatacgctaaacccgatcgggcatccagttttcgccaactccgcctggccgaaggacaatcattttccgacctcaactccgcaataaccccaattaaacacgccaaaatgagcaaaacgactaaaatggcagggcttttccggcccaagaagcttgatctctctggatttgtcaatacccgcttgattcgggacaacaacaagcgcatggccttcgagcagactgagccagaacggtacgaacactgtccatctcctagatgctccagcttgaccgaggatggctatcccgagctggaaaatgcttggaattgaaaaacaaatgctgactctgtcttccttcgcagacaagctctccgctacatgatccgcaacacctctctctctggccgagtgcgcgcgcaggctcagctccaattggcgcagatgcacccctatactcgccctacgcagatcaagaaccgttgtgtggcatcaggcactgcccgcagtgtcttccgcgatttcagaatcaacagagtaagtggaagacttcagccaatggcctcatattgctaacactatatttttctacagtatcaattccgtatgcaagccctcgctggtgaactccccggcgtgaggaaggccagttggtaattgtatgagattattgctagttctctgtaatatgtggagaaatctagttgaattgtttgcacgatggcgttttcttctttccttccatggggtggaagcatgtacaatatgcatctctcattagtagagaaatcaaatctttctttgttatttttggatcctccgattcaaactctgctactctcggcgtaggaattgacttattgacaggcctaggcgttgcctgatcctcgtttgctaatgtcgtgagatcaggctttctttgttggcagtgttgagaccgtctcaattgggttgtttgcttctatcatggtggttagttgcagatcagcctggctcatttgattgatacctgactgataattcatcatatcagctcagtggtggtgtatatcatcctcaatatcggcgagaagattcttcatgtccgcatcatccccagtaattgcgcaagtagggagctcctcgatacttgccataatcatatcgtgccctgtcctgaaatcactttcaaagctgcggtgccttccggtcctgctcgtataaaacctcccacctcttcctttcgttttcttcttcctcttcctcttctaattaaccatcactcataaacatcacccatcttccccttttgtccctttgaccttcttctcaaatcaacctcacacattgatttgaagcttcgccacaatgaacagcattccggaggacctcctccccgatgacatcgtcttccctgaagacctgctggagcttgggtaagtttttccgtggttttcaaggtgacatcttagccttggagtctaacagtctattgaatggtacagattcgtcatcaccaaagatgacaagattcgttacatcgacgccccgggccagggccctcgttacaagatcaaccgaaatgaccgcataaaccaggtccacattgaggcccttcacagtgagtttaccattagattcatttccatcctaggatgtggtttggatgaatcatttggcgctaacaactccacagaagcgattcacatcagcatcattgaccgcctcctgggaatgggcatgcatttcatgaaggtccccgagggcagcaagcagcggcttcccatcatggtgtcgggcaatgtgaccgctgcacctcgaattgttgttttcttcggtgagattgtcgaggacctgggtgtcttctcgtaccgtgacgcttgcgacgacggtatctctttcggttcgatcctgggctttgcaaagggtctgctcggtgagaatgctctagattcgccgaatgctcttattcttgcgaacgcgggccaaaccgtctggtacaatggaaatggtggctcggcgatgaccacagacagtcttcatggccaacatcgtgcctctgccgtgcaccgcgaacgttcactgggtgcccgtaacatcattaggggcaacatttccattgatgatcatgtccggaatatctttgagcaagtcttgatgcgcagtaacttccgagtcgatgccagaatcgacgtcattggcctgtctgagggcggccatgctgccatggcatacctgaagaatcgatgtgagtgtctgactgaataaaatacctagagttcgcttactgagatggttctagggagtttctggatgccccacatctcctccctgtccttgatcaaccccgagacgattgttagcactgacgccaacaaggcatccgacccaaaggagaatgacttattcggctggttcatgaaataccgttgccgtggctggaccatctgtgatcagccgattggtacacgtctgcgcggtcttaccctccctcatggttgcaacacgtactcctccggcgaaggcacgaagtcgtcgggcatgattactcgtggtgtgggacacatcttgacctggatgaacattatgcattactccccagcggctatagagagatttgatgtggtcaagggccagtataatcccaacttcgcagctgagctcggagcaatgacctacggagaccaggcgcaactccctagcggcaagattgaagtgcacagcctggatgttatgaaacagattaaagacttcctggccggcgtcaatttcaccgaggaaatgaccacttttttcaatgacaagtcgtacttcagtgacgatagtgacaacgaaagcgataacgacagtcagcgttcggtcgtttacgcagataaggacaatggtgtgttcggcgtccctcctgccattcctggcactcctaactccttcaggtgctcccaacactcctcctgacactcctgacgctcctggcggttctggcgtttctggcactcttgacatgcctgttgacatgcttcctgacgcttcctctggcacttcccctggcacttcctctgatgcttctggtgttcgtgatgttccttccaccatccctggcggtcctgacgttctttctgactttcttgctgacgcactttcagttccggaaagtccaacctactatgacgacgtaatcgtcggtaagactggcccgttcgacctcagtgatctgcaggccatccgagaggaggacgaagggcaagagtaaattctctgagtgtgccctgggtttcttctggattttttgtttcccggtgttcctaccggtttatttttgcttttgcgctgggattattcgcgagcagatgcatgttctttcctccctacttgaggtcaattgactagaaaacacaaaagcacaaaaaaaggagggaaatgaaacccatctgcggaagcgaatcaataaaacctagcgtatcaatttcccaggccatttttactgtatgcgacgtgagtacatatgtacatgtaagtatgttgggatagaacggtggaattgttcaatgaaaacccggcaaaatcagggccaagacggccacgacggtcacgacggtcacgacgcaacattctcaaccctttccgagacaagcatttccccccaccggaacagttttgatcgagtaagaagaattggaccggaagatgcccagacgagaagacagtttccatcgagtaatctgataaagcgggccattgataagcggcaattgcccggagattccacatcggaggtggccgacggccttttctcgcctcgatcgatatgctatactcgtctcaacatgccaatatcccagagatataaaggcacaggggcatggcctctcaggtgcttcctcgtatggcaaaggtgaaggccattctgcagctgcatgactgtccgaaccggctggtttgcgagtacataatggcaacaccggggtctggaataatggctcggcagtgggcctgtggatattctcaggatattccctgggtaatccccttcttcgctgggagggagatcctctttaaccccaaggtgggcccggactgtttttttcttcggaggcagtgggcgtatttatatctcccccggtccccttatcttaggcctgttgcccctcttatcttctgcttatctgaacggctttcttatatttgaaggttatcttttggttatacttcagtcttcagttcgacatatctagttatggcaactaatctcccctccattgctgtggtggcttcatctcgcgccgttatctccggccgtttgacttctgccactgttgtgatctcactgacaaccggtaagatcaccgccgtcttcgattccgtgatcccagcatcggagttccctgtgaatactccctataccgactactcgcctcatgttttgctacccggcctggttgatgcgcacgttcacctgaacgagcctggccgcacggaatgggagggcttctacacaggcacccaggccgctgcctttggcggtgtgactactgtcattgatatgcctctcaatgccatccctcccaccaccaccgtgaacggcttgaaggagaagatccaggctgcccagggcaagtgctgggttgatgtcggtttctatggcggtatcatccccggcaatgcgggcgagctcaaggctcttgtccaggagggtgtccgcggcttcaagggtttcctgattgacagtggtgtaagtgaatgatatcagcatcgtgtgttctccaattagtattaacattcttcaataggttgatgagttccccgctgtcgggagagaggatattaagaaagtcatggccgagttggccgatgagccaacaactctcatgttccatgccgagatggtgcctcccattaccgcatctgtgggcgacgaggttcagacatccgatgcacctgccgaccctgccggcccccttgaggcgtatgcgactttcctggcctcaagaccttcttcattcgagacctgtgctatcgaaagtattctgtctttggctcatcttgctcccaatctccctctgcacatcgtccacctctctgcaatggaagctatccccttgttgcgggaagcccgcgccaatggtgtcaagatcacagccgagacctgcttccactatctgtccctggcagccgaggaagtacgcgacggcgacacccgccacaagtgttgcccgcctatccggtcaaagctgaatcaagatagtctgtgggaagagctggagaagcacactggtgacggcgtcatcaagaccgttgtctccgatcactccccttgcacaccagatctgaaaatgcttccagcccatgtccctggccactgtaccggcggcaaggaagaggagagtggtaacttcttctctgcctggggcggcatttcttccgtcgggctgggcctgcccattctctggacagacctcagccgccggaagggcctgacttcctcgccagaagacgagaacaccaagaacgcccttcaagacgtcgtccgtctctgctgtgccaacactgctgcccaggttggcttgcagtcgcacaagggcgacctggttgtcggctttgatgctgatatttgtgtttttgatgactctgccgaatggaccgtcgagccgagcaccatgctcttccgcaacaagtgctctccctaccagggccgtactctgcgcggcatggtccgcgagacctggctgcgtggtgagcgtatcttcagccgcgaccagggcttccatagccaatcgccacatggcaagcttcttcttgagaaacgagtttgagatattccctgctttcttactcttcttctttctttgtccacgcttatctcggcattgcgccttgctatctcttctatatctctgccactttacatctcgatctcaacctgtgagatcgaaccctctgatgaaccctctgatgagcactaatgatcgcacaacattcatacccgttagattaatgacctcgcattctagcttttagatagaatactaaaagcaatcaattgaatccttccaagtctcttaaatcaagctagcacagagaaatacagtaatacagtcattattgttgaatactatatagatacatatcaaagactcccaacatccttcttcccatccctccccttctcccacttctccctaaccctcctcctaacacccccattaacccccttcccccaaatttcctccttctccgtcccaacctcaacagcctcatccgcactatcctcctctccaaccggcccaataacaaccttcctctccttaaccgccctctctttaaccctcgcccgatccaccttttcaagatatgtccagtacaagaacgcctctgcaacggcaacactcagcgccgaaaacaacccgagaagaaccttaaccgcctcgctcgccactatctctggcgtcgggaacttcgtgagcgccgcgtacacgccgaacccggtcaccaccaccgagatgaaaacactcgaaaccagtgagaccgtcagcgtatcttcttccactcggccgtcgctcgtgtagggcgatgcgtgcggatccgcgtggtcagcgtttggtcggtagtttgggtttaagagtcggttgtaggattcttgttctgttgctgcgatgaggcgtgcttttgatgcgaggtattcggcgctctgtattatgtaggatgttagaatctggtttggtgtggtttgtgtattggaggaaaggaagggattggatggggttgtgtatagaccacgtacaggctctggcttctttggcggcggagggacgtagactttcgtgccgcggaggagggaactgaggacggttgggatgtgagaggcctgctctttgtattctgggtcgttttggaggtatctggcgagccggatcagttgttcgtgggctattgggccttgtgcttccagcgtggtaggcaagtctagctcctcgtggcgcgaagctggaatagcttcgaacgcggcgaggatgcgatctgtcgtaagaaggaggaccattatgatacaatccaatggaattagggcagttcaatagaattgaggtttagttcagttcatggggagataaagcggaaccccaaaaaagtggcagttaagctccccacatcgtcatatcttcctctctcctctctcacatacatttttgcgactatggcggactcaaagaagaggtaaatttatattcctattctatatatctacatccccttctatctgccaacctccaacctcaatcccatgcccgcatccacagaatccagaaaactaacccctccaacagcacggtaacaacacaaaccaacccgcgcgggatccccgtcgccccattcatcgacaatgtcagcgactacgtctcttcccgcgaggaagtcgagcccactctccgctccttccaggagatgatctccaagtaccagttcatggaggtgaacacgcagcgccgcggccagggcttgcgcgagaagatccccgatatcaaaaagacgctggagatggtgcggttcttgcagctgcgcaaggaggtaaatatgccccgcgcgcatcctctatttatcatacgcacttcgaagaaaaggcgatttgtggaacatccagctttgggaaattgaatcggaaattggaattcgggaatatcaagttcactaacactcacttttctagtccaacccaggctccgacctcgaaactagcttcgaactcaatgataccctctacgcccgggctgcgatctcacctgctgatgccgaggaggtctacctctggcttggtgcgaatgtcatgttggcctaccctctcgacgaggcggagaccatgctggatgacaagcttggttctgcggagttgagcttgcagaattgcgaggaggatctggaattcttgcgcgagcagattacggttagtttattcggtttgcgggcataggtgtgggaggttggtatattggcgcttttgctaacatttgactttttgcagacattggaggttgccacggcgcgtgtgtacaactgggatgttgtagaaaggcgtaagcagagggctgatggcaagggtggtgaagaggaaacgaaaaaataagaagcgccctggtggctgaatatgtcttgaagagatttatgggatattataaaaatgttgccaatgtcatcgattatgaagggtctattatcttccaggttgaatgtcaaggaaaagaatcaagagaatcataatgcagcatggagaaatattgaaaagaagtagtgaatattaagtatacgctctaaactaaatgccctatgcatataaaccgaaaaaagagacgcatgtcatgattcgtgaaaaccttgagaggtaatagaaaatcgccacaaaaaaaaaaaagaaagaaaaaacagaccatcgaagtgtcctccataacttcgttgagtttgaggacgccaccttcactatgaaccttccagtccacgcgcctgtacggcatattattgttggcgacaggggatccgaagatggtagagaatctcgacggtgcgctgctgtgtcccaaacaaaacgaaatgctaatcattcaactttgggaaacagaatcattggaacatgttggaacctagtctgtcggcatcagaagcagctcgctcacgcatccgcttcgagatgtcaaagccagtttcatcaccgacaaaggtccactcctcaatgtcatcaaggtcatcatcggctccatccggggaggtcttagctgtaggtgtaggagagaatggggtggacgaagcaagcgacttttgtcgggccaaggtcttcgcgtattcaagatcacgataaagggcctgaattgcagtagccacaccgtcttcctaaacaagggaatatcaaattagcactccatcaattaagcttgggtagacttagaacaactcacattccgaatctgaacacccagatttgttgccctcataatcatacgttcactgtgcgtcgcctcccacagagcccgcgagaagacactgacgttcagtttcttcaagcagatgccaacaccgagatcctccacccgggagccgaagaagaactggtctccgaagaatggcttgatgatggtggggacgccagctcgaagacttgcgccagtggttcctgctccaccatggtgggctgcagcatcgatttgagagaaaagccagtcgtgaggtgcagattggatctggtgaatttctggtggcagaggtatctcggtcttcgtgctagctgggtcgccaagcctatcggaccatcccttcgagaggatgcatcggacatctgctttctggactgattcgatgacggtccgtgtcagagcagaaggatccgagaccacaatggatccaaacccgatgtacacgagcttcttgccatccgctctggcctgtgcaatgaaattcgatagttcagtaggaggagtccaatctgtgccctcattcaaaaaccagtagccggtaatgcgaatccaatctgggtaatcaagaggagggaccaccacggagggcgagtagttatagaggaacggaactttgttctgctgcatcttgtctagggttgtggccttcaatcccaactcgttgtttcgccagcggttcacttgccccgcgatggccttccagaagatgttgtcgaacatgacgtatgtgatgtagttgtatgctccacccatgcgattctctggcactgcgaaagcatgagggtaggcccgtgttcttgtccatggcatggtgaatccgcggaagtacggaatccttaaagcctctgcaatgtgaattccggccatggcgctcggtgactcgattagaaggtcactgccctgacaaccaatccaagccgacgacaagaggtcatcgatccatcctctgaacttcattgaagcttccctaaggaaggaatatgtaaacatcccgttctccacgcaaattcgcattagctctgcaggatcaccgtcaacgggagcaaagtcaatcccgtgttttctgatccagggctcgaactcagcgtgggttgcaattttcggtttatggccctccgcaagcagtcctttgcagagcgcaatgtacggttgcacatcgccccgggagccgatggttaggcaagtaatccttagaggctcggaaggtttgaagttgataatggaagcgcgaggatcgtcgaagaacggatgtatttccgatgaatcctcggtgaaagtcggacgtgcatcatcttcctcggggctatccagccttgcttcctgaagcatgcggtgctcagccttagctgcttcaacttcgtctcgttcttcttctgctagcaagccagattccaccaggaatttcacggactctagattctgatgcagtgtgactgcacagtcgtctcgtgaatcggaggcattgaactcaaagaaaagctcttcatggccacggatgatgacaacaagtccatggtacccaaaacggaagcccttctctttttcaacgttctcaatgtctttgaacggtagaatcatcttggtccgagtgccaggaatcaggctgcggaagcaaagtttcttctgacttatatagatcttgccgtatagcgggagcacacgatgcaaataggcgtaataggtcgcctgcagtttttcggtagatggaagagcgaagtgtgcgcgaaagcgatctccataattgaatgaaccttcgttgtcctcgggatcaacgttctgatcttcaagcaatggcccttcccgttctccataatgcttctggccaccaatccacatgccagagaccttttctatatagcccattgactctgttgctaagagtgtactcatttgtttcgagcggctcttcaagtattctgcaaaaccagcggcgcgttgaagggggtatgcgcccactttgacaagatcgtttaaatgagtaacggagctcggccctgaagattgcattgtattagattcgccagcgatatatcgcgtgtcttcggtggtttcattgcgacctagtgttctagatggagagcctgtcgctgcacctaggtccagccgtgtagacgcggagggggtcgtatcatcagaattccgttgaatattttctccgacacccaatgagcgtccttgcagtgtgcgcatagtgggtgattggaagacgtcgcttctgtgtagtatctgactggcagattcagtggtatctgtcatggattgtacaatcggcgatgattcggtcccttgctctgcaaatgaatctgtcgagccttgattttcgtttcctacgctggagcttcgcttgcgcggtgaaacttcctgcctctgatcagacaaacgaacgctactgactgactgtctcttttgatttttgatatcgtgttggctctgcggctctttcattgcagaggtagccgacgcagcattgaccaggcgcttgatgtagttaaatgcgtcttggtccgaatcaaagaatgagaaaaagtactgtgaactgattagcaatgaacttagtaacgtttcatccaacgacctacctcgtcaattgcgtatgtttcgccgctgtcgagaactcgaatcttgaatgtctctgcgaaatcggccattgggctctcctccaggtcaataatattcgctattgggaatgatactttgacactgtcgccttcattatgcgtccggaagatgactttctggagggctttcacccattcctttgcactggtagcactgtctgctctgaataaatatgtccgctgatcagtggtgacctgaaagtccttcacatcaccgtctttgcgatctgcgagagacgcagagatcccatatcgaagatcgacatgtccgctagggaaatagagattggagggatctgcgtagtatgaaaggacatcacccttcagcgcgaaccaatagcgatgatacgtagggttcttgcggccgcgtttggataggtatcccgactttatcgccacgttggacttctttgggaggtaggcgtaaaagcagatgtgaccttctgtcacatacatgtagccttgaagaagcatgctctggagcaacgagcatgcatactccaccaaaaccttttcgggcttcgcaaactcaaacatcttcatcaatcgcgtagaaagagcggacgcggacgattccggttggtcttccatgggtttgtttagatcgggtggcgagtgtggtgttgccgatgttaagtcaaagtgagattgcgcttcaaccatgcgacttagaaccggggctgctcgcggtgtcgcactgcgagttcgccttaaaggaggcaccttgagcatcgggtcgattgggtttgatgactcgcttgcctcgtcttctgaatctaacttgggtaatctctgcaaaagcttattgtctgaccttgttctttgatggcgacgtcctctttcttccagaaccagtgtgtttgattctggtctcttgcttggctggcgggagtccaaggatggcacaggcgtccgcgatgaagggtttccactagtttgctccatccacgggtgttcttccatatctccatcactatcacttgattcctcaaaccgggcatggaagtccgacttggacccgacagcagcaatcatggagaagagggactgttgcatataatgcacattgccgtcccgtgaacccataccttgcggcggagctgtgaaatcaaactgagcatcatccccatccttaaatttgtctggcactcgatctgaaaatggacggttggacgaagtaggtttcatacttgcgctcaactgccggtctgcccggcgtttggcatcgtctctaaacggtttcatccttatctctggtacaccgatacgatacaatcgatgcaaaatgtgggtcaaggatgggagtaaacgatgctagggcgcggtgaatcgctgagatcggtcgggcagtcagaagctcgagccaggtgacagctcggcgctgataggactatgacgatcaggtatacactagtcaaacggcaagacacatcagtctggacaacatgtgactttgtcatatcaaaaccgcggtcaggcgccaaaatcgtgatgagcagggttaatggtgaacaacgcacgggatggcagggtctaggccgataagcgctttgaagcttggacactatatctggatgatgctgtcaatccacactccaaatcagccaagcgccatgatatatattaaaaagatgatggaaatgaaaaaagaatggaaaggaagtccaaatctatcccaagagttcacagaaatctcagaatgcacaaagggagaaacatcacctgggctctctccgcatgcatgtgatctatgactccatcgccccttatgtcagctgagtgcctgaggcaaacagaatttatatgttgtaggcctttatgcctcttcagatatattgaataccaaattgaagttaaattgaagttgaagcctattactttgcgtggaagggaatcttaacttagagaggcgtttaaaaaaagagctcatcggactacactcattgcttcgacactatcaaatcaacaaaagacaatggaacacagagaaaataagattgtaaattgtacatagtattggggacgtcgttaaaccaaagctattctcaaaacacactaacgccaaatcatgccttttcggacttcttccgcttcttttcttccttgtccttgtgggacttcttcgacttcttccggctcagactatcatcctcatccttttcttgtgagtgcttctttgacttcttccgaggaagcgctgcagcttggggagcttcatcctcaacgtcatcgtgatcaagcttcctctttcgttcctctcccttgggaaccttgaacgaaggcgcctcaccctccgattccgagctagatccaagcgtctctggaagcgcactcgttgtaccgacaggccggaagcgcattttcatgtgcttcggctgcggccgggctggcttgacatattcgcgcaactctgccactacagcatcggtcttttttgatgtgcttgggagaccgatcatttcttggacgtggtaacttgggatgctttgggctgctgtggaatatgtttgtgtcttctcgtcgaaaagaagtagtgatttggttgcgggatcggcctcggaaagagcctcggctgggatgccgtagttcacaccgtcgtgggagatgatcggttcaccctgcatgatcttggccatgcacacctctttgattttggacaaaggtagagaggccggtgctgtgaggtgaaggacttgcttgccgtcgaggttggagagaagggaggagactttggaggatggcggggcctgcttctttgcagacttgaaacccgctggtggtttgtatagctgaggaccggagattacaaccctatgggcacaagtattagttaccataagagccgatagaggataatctctcacttcttgcctgagctggagtcgggcttcatctcgttggagtcgtcggagtcgctatccgaatccgaacctgagtccgaggtatcatcttcgcttgattcctgtacctttgtattcttcgtcatctctttctctttttcagtcatgaggtcaagcgaggccgatctgctcgagctgctatcgctgtcggatgatgccatggcgattgttcaattgtgtagggcaaactcgaggtcgacactcaaatgctttcgcaagaatgcgcggcgtttggtacacccgaaatccacaagacgaatgaaatgaaacgatgaagtaatgtacagggtatatacgcgaagtttcagcaaagccgatttcgcaaaatgaattggatcgacgttgagtgaggatgctcaggtccaacgatctttttttttctgctccgcgggagcacggaccaccagccaactttttttgcttatcggctttggatcgcattatcgaggtcgatttcttttcgaacacaagctcgaagcttgtctacccggactgtataatatcatggttaagcgaaaggccgaaaaacagcaaccagctggtaagccgtctatccatgccctacaactctaatttgaagctcacatgtcgtttctctaggccctgttagcgctgtcgctgctttggcagcgcgcagagctcgacaacaacaagaagcacagagcgcgaatgtaccagcggatgcaccgcaggctattgttgcgagcgaaccaccctcgaaaaagtcgcgacagtctctcgatggacctgaggcgactgggacaaaagaagagcatcgtacacggacaaaggcagcaaagaaacaagataaactattgcgcacagagacaataccggagcggccactaagagctacccggcctcaagaattggaagtgaagcccgagttggaggatactcatgagcacctctcagacgagcagtctgaaaaggaccaagtcgagcatacagaaaagatggatgaggatgatattgcatctgttatgggtgatgccgatggctatgaatcacccgcagaaacacccgcagagcttcagaatttccctctatccaaggctcggttgaacgaaagcaacatagtctacagcgatgagagcacactttgcattcgcattaaggaacgcacggtatggatgaactttccggccatttggagtgaatactgatctttcccttagaacctggcgttggtgggccattatgatctctgggtcaaaagaggtgttgtcagtctgatgggcgcgaagttacatccgtcctcgcagttgcatagagtttatgctccctcgacccactctttgccagttatcaaatgtgttgctggaattgatggcgacgcagaagtagagatcaagtcttgtactagcggtatctcccgcctccgtgacctctcgcctctgtatcaaaggatatgggctggtgagaacaccgctgcagataaaatcaccctgaaaggagccgccaaagactcaaagcggactttttcagtggtatgcaatcatactctactccagctcgagctgtgttcaaagctaattgacttgacagttgtatacttcggcagatgattctttaaatagacatatccgaccccttcacctcgacaagaaatggagcgcgtcgatgaaaggtctctcacaacgtgaaggccaacttcgtgttctaatttgtggccccaaagcatccggaaagtccacctttagtcgctacttgttgaatcacgttttaagtccgacacccgagaccgagaatggatatactaataccgatggagttgctttcctggatctagacccaggtcagcctgagtttgcccctatgggtcaagtgtatctcgcgcggttgcgctctcccttcttcggtccgcctttcacccacccatcattggacgattcccgtgacggtgaaatagtgcgggcgcatcatatcggcgcagcgtcgccaaaagaagaccccgatcactatgcactggccgtcatggatcttatggatcaataccgctcgttgctggagaaacatccccaatgccctctgattatcaactaccctggttggatctttgggcaaggattagaggttgcgacttggctggtcagatctctcggtctctctgatgtggtatatatgagtgaaaaaggcccatcagaagtcgtggatccgttaggtctagctgcccgtgaggcccgagtccccttgaccattctcccatctcaacccactgattttgtgagccgatcaagcgctcaattacgagcgatgcaaatccagtcatacttccatatgtctcatccaaatgatctcatcacttccctttggtcagatgtaccgctatctcgcacgaggcctattactgtggactatgccggtgcacgacaaggtattttgggcgtcatggtaatgggatcacagatcaatcccgatctactgcacgagacccttgagggtgctatcgtaggcgtcgttgcagtggaatcgccgaacgccatcatgagtgagatgtcagcatcaaatgacgaaggccatgacgatattgacatgggttcagcaaactcaggcgcgggtaattcggctgagctttccatccctgactgcattgtgcgaacatccgaagatcttccttatctctttgttggttccggtagttgcaccccattggatcccaaagcgtcaaactgtcttggtcttgctttggtccgttcgatcgatacctcttcgcgcaagcttgagatctccactcctattccctcatctcacctagaaaaggccatcgagcaaggtcatggcattgtgctagtccgtggccagcttgataacccgaattgggctattagtgaagagtactacgccgctcgtgcggcagagcggcgctaccagcaatcgacctctgggccgaggaaagctggagacattggcagtgaacaggcatacgagctggatccggccgagcatagtcgaacgcttgcactgctgcgagagagggttcgccgagcgagcaatgtgccttggatgactgtcgtggaagataatagtcgtcaccagcgtgaagttgctgcgcgacgagaaaagtcactatggaaattgaggaagaaggcatatcccggcagcgagagcgaggcggactactagctcccttctatcaaatatatacatagaatttaaatgtgacagcagtttgcacataaagttactgatttctatgtataggcctggaggtttcacaaggcatttccaccccaaattcctcattatttgattctatgacctgtgatttctctcgggtttggctactgattgaatccgtgatctgtatgtagcaacagatacgaatgaagagactaacttgaagcattgaaaataccacaaattgagcgaagacaggaggactaggtgtcaactggtagaattactatggcctgaatttttattactttccatgcaacgcacttttcttgacatacaattctagctagtcaaatcttttcatttagacctatagattgatatctggaaggatgtagtccatcctgagccaatggcaaccatacatcctcatgcgattccacaattcagtcttccttcctcgcttaacacagtaatactttccataataccgtagttttacttgccgagatcgatagatgtcgatacagatatactatattccgactttctccccggcactgtagatactatgagatctttagacttgtcctagttcaccccttatgcagccaccattctacaacggactagagctatggtaatgccaatgttcgaacagacacagagttttccaattattctactcaagcacagagatcctgtccacgcttaagggattgagatattgatgtccacgtcatttggttggtatagacagaatcatgctaggcttagggtttgaggaatggctagaatgcaaaggaggaagccatcagtgataatttccttttcaaaatatactaggctcaagtctggcgttaaggcctttcccccgataatagtacctttccctgataagatctttgatcgatagaatacggcgaaaaagaccaaatgataagtgatttctcacttaatcttctatactacatcgtggaagcgagattgatgtgtctaatgactttataaaaaaggcagttaactaagagattgtgtatgtgctgaatcatccggctgctggaagtatcctcctcccaatcgacaagatgtataaataagctaatatcgactttggttgtaaattgagaatggctttgaggtcccatatcacagcggtatttattctcgagccaacgtagttccatgctaattttgtaaaccaaactgcatacacactgtcttcacacttccctccgccccatagtcgctcaaatccatgtcaataggatcccctatatcatgaaacccgcacttccgatacatcgcgtgacctgcagatgatgcttccagccatgctggtatcttatggaaactggcttcctctagccctgctttaacaagtgcaatgccgacgcctttatcctgggcttgaggacggaccgcgagaacctcgaggactataggacatctgagtaaaggcttctatcgtaaaaatctgttcaactcacggctagcgcattttccagtaatccattttcttcgccttgctgctacagctctatagaagtctaggaaggctgccggattacccgcagtgtcgggggctgttttctgtctctcttcggtggctgccgcttctctttcatgggttttttggtcaaggtagacagtccacaatgaccaccccatgatttcaccagtctttctgtccgtcgcctttaaaaacagtgcagttgaactagtcgtgagtagcccccgaaggaatcctatcatgtcttctctctgatctggcgagccgtacatcaaatgcataagcttgtcattttcaaatgcctcatcatggatacgaacgagggtcggaatatcctcggcggtgactggttgtaatgagaaagaggatagcctaggcattgtgcctcgaggcttccttgttgcggaggaatttaattaagtgtcaaaagaacggcaatagaacggggactttcgaaatgtatctgtatctgctgcgacggctttgaggtcttaattggaagctcgacatcaaaatgcctgtggggataactgtcgaatagaactccgtagagtccgccccgctatcatgtgatcgatccaactacgtttatagttggcgatagaggcataatattggttagcagactgtgcttcatcccgtgctgatccatcagactgtgcacgtctttgtaccagcaagatcccctcatccgaaaaggacatttgacatgacaagttaagcggtaccgttatttcattctatatcgagcggttcatataagatcaggttgtaaataacaaatgcaaggctcataacaagaaaaagactttccatgcataacgcttagtttgacaaaaggaggctggcaagccaagacaagatataagcaggcttacagctccctgtcccaggacgaggcatcactgtctgtctgatctccttgcttctgccacgactggaacatgagagttgccacgttccggcccatcaacgcactagtctccattgtcgagatgaagctctcgatgccacctgtgtaccacacacctggagctagaagagtctcctcaaaggtcactcgcggatacagaagagggtatggattccatagcttctcatggaaccagctgatatcgcctatcgataggtctccaatggtcgtattgctccccacaatctcactctccagccccagaatctgggcaatgaattcagccgtgggccgctctggcgagaagattttgtaaacataatgttgctgtttgtctttagaacccgcaacagaatgatctactcttcgaagtgtactaatactccagaattcagtgaggccaacaccatctgggttcgaacccagatcaacgcccttgggtagagtggtcagaatagtctcgggcgctcgagcatttgaatcgttcagaccaaaatacttcggcgagatgcggtgaggggatgcaaagagagtaacgtgcaagttgacatatggaatctcatctggagtgttttccaagggaggggagacggagatacccgagtactgcaaaggaccggcaatgacaacttcgtcgaatagctcatgctcggagctggtagcggtgttgacctttgaggagacccgtacagtcccatcatcgttgcgtgaaatctcagtggcggtggtattcactttgatattcacctccgaggccctcagcgcgccatcgaaaatgcgccaatttccaccctcgatagaaaccgctccatccgtagccatacagacgacagattccaagccatgaatcagctgcaggttctgtccataattcactcgagtacttgcttggatgatctcattcgcaaacagcgagctgatttcatttgcccggagaaacacatcgccaggagatgcagtagcattgatcaagtcagccgcaatagctgcctcagtaagagagctgaaagggaataaaggctcttcataaaggcggagaaacctgccaacgacactctttaccagattctgagtacgcagaggcgccagtccataacgccagaagagccggccgatattccaccagctatacgaattcgtcaacgtgaaaacgaactgggtcccatcccagatcccgatactctcagcagtctccctaggccgtgcatggtcagcactattgaccgtcaggccgagatcacgggaagcgttgaccaggttgtaattgatctggacaaaaatggaagcacccagttcaatggggtacgatgggtcgtcgaatacattgactgttgttgagcggccgccaacatatgattcacgctcatagactgtgatttccacaggaatgttggcttcatctgccagcttgcgcagttgatatgcagcaaacgagcctccggctccggcgcctatgggagtatcagccccgtatggaactgtgttctttagagagaggcataccgattattgccacacgctttggggttgcactggcggcttctcgcagttgctcttgttctgctgcattgccaaacgagacgagtagggcagctaggatggagtacagtaagagagggatatgccatggcatagacggccacattattatggtagcactagaaaatggcagagctaattggtagttgaacagtagatactgattagccagagatcaatgtatttcaagatatcatcagatgaaggatcaagggcggaggtgatgccatccatgagtctaatttggtagtcggcccatgtcacgctagtctcttctaggactagtgcgtttccatatcgcttatctttttgaggggcatcacagttttgattcacttaactccgaacaattcaaaatggattcctatgacagtgactccagtttcgatgaggacttcaccgataccggtgtgcttctaggctatgctgctgaggatgtcatcgaggatgtaatcagccatcttggaggctggccggtaagttaccacgagtgatcactttgtataagcaatttcaactaaccgctactttggttcagaaatggctcgatgaagcatccccagcacctggcgatttcgccaattgcaaagtctgcaacagcccaatgctgctcctcctcgaattgcacggcgacctgcccgatcacttcccgactgatgaacgacgcctatacctattcggctgccccagaaagccctgcaaccgcaagccaggcagtatcagagcattccgcgcagcgcgtaaagtcgccgtcggtggacaaaacagacaggttgaaacgaaaacagaggaaacccagcccgtcgcaccagaacaacccaagcaggacctaggagcgagcctgttcggcgcaacaaacttgacgagcaacgtatcttcgaacccgaatcctttctcatccgcttcgggcccaacacccgcgggaagcaaccccttcgcgacaccagttcaggcgacagcacctacagccgagaagcccgccgtgtctgcaaccaacctggcctcatctttcgccgataaagtgcgcatctcctcgccaccgccctcagccgcgacaaagaaaacaccggaatcaagcacagcggtcccgtggcccgcgcagtccgcgttccctccgccgtacaaaaatttctacctagacgcagaatacgaaactctctcccggccatcttcacccacagtgccagataatgtgcaaattgaaccaatggaggaagaaggcgctggtggcgcggagctcaaggacactttcgagtccgaactcgacaaggactttatgaagttctcgatgcgcatcgagcacaacccggagcaagttctgcggtatgagttccgcggtacgccactgctgtactcaactggtgacgaggtcggtacccggctgcatgttcacagtgctcctggtgccaagatcaccacactcggttcggggaggatcccggcctgtgagtactgtggaagccagcgtgtgttcgagttccagcttgtgccgcatgctattactatgcttgaggaggggcgtcctggtgttgggcttgggaaggatgatgcgggcatggagtggggcactatcatcatgggagtttgtggtcagaactgtacgccgcaggagttgggcgttactgggtggcgggaggaatgggctggtgtgcagtgggaggagttgagatagatgtggatgtggatgttttgcattagatgtgagggctttgcctaccctaggttgtacatagcaatgtgaccaggaaaacggagtattttggatgtattgccgagagatcgccttgttacttttttgtcacttttgatgcagagaatggctctcgtatatcgaatgtttgagtctgcccacggaataggagtgctgcgttggtgccatttatgcgacgatgattctctatgtgagttttgctctctttaagtggcctcgggagaagttctgtaaaagaagttctggagattatatcgatacagatgggcttcgcccatttgtcagtagcaacttagacatagttagggcacgggtacctcaaccggttagtttatatacataagaagtgtgttagaaccagttacggaacttccttggttttctagcaatctaggttgtatgtatatttaaggtagaggacatgataaataaacctagtactatcatcttttctcttaaagtctatatatccgagaaggattgattgagcgcttgaggattctttgactgggcgggtccctcctgttaattcagctgtattctgattcagctgggaataaggtcatatctgaatgttgtcatttgggctgataactatccttcgcaaatgacactatgtcgtgctgtatccccattgcttctctagaactggctctgtatgatttttgatattggcagcaaagccggccttatggagacacgactgaagttatgctaatggtataaacatcacatctatctctcttcctcatattacccagtgcaaatatttgcacggacaagtaaaaaaaaagaatccaatacagacaagagaaatagaaaaaaaaaaaaacaccggatgcgccaggccccgactcatctccgagcccctcctccatgcgaaatctctcatcggttcgtcacttgatcgggggtgggattcatgaactcatgtcatggatggaaatcaaacgatttccctcacacagctttttggagattttaaaaaaaggtgatgcgaaaaaaagaagatcaagaataaagagcttccgcagtaggcgcttatgcgggcaactcgaagccacggcggatgacacgaccgaactgctcgataccgacgtgctcgctcttgacctcggagcgggcctcgttctccttgttggtaggcacgcggatgacggcaccatcgaccttccagccgcagacgtcgacgacgaacttgtcgagcgcgtcacggctgcggacatcgagccaggactcgaggttctcggcggtgatggagcggaaggtgttgccgacctcaacggcgatgcggatgcggacgagttcctcgaagccggcaacgtcggcggtcaggtctgcgtacaggtcgtccgagttcagagtggaccagaactgggcgtactgggcggactcgaggagtgaggacaggcgggtgagcttctgcacggactcgacgaagtcggaggtctgcgaggcggagtgggcttcgttggtggtggggaagggctgggtgtttgttgggagcagagcaaggcagagcgagaaggcgggcgaggggaacacggtcagggccttgaccaggatgttggtcacagtgtcgggttggataaggtgggggttgaactggaaactggatttttttgaagagtgttgttgtcagtttggattcgcaaattttacgatgatttaggtaaccaatcaatgggttcttcacgttcagtatcttcaatttctcaacattcccaagtatattatgggatgtcaggtaataggaaacgtttttaaaagatactcatcatagtggagctttccaaatatgattttcgcaatgcaatgcctcgctaaaagaaaggggtctaactcacagcttcagcagggccaagttggcgtagcagtcgaatgaccggtcctcgcactgctgggacacatagtcctggaagacggtggtggtctcggggttgtaccgatcgaggccattgaggattgcctcaatatgggccggccgggtctcacacttgtcgaaggcgaccattttgatattgctggagggaggtgggaggtgatgcgggtcttttgtctctgctgttctttttggtgggattttccaaggtttgattgtggccgtggccggattaacctagaagggcactattacccggaattcttccggactataccacacatttgcaaacaataatactcgattctccgaaatagaaaagtggccaatggccttagattgactcgtgttcaaataatacatagaatacatatctcttgaatgcctcgtgcgatcgtgacatctcaatcataaattagccccagtcccaagaatggaaacccgctagagacgtgctcgaatcgaactccgtgaagatcgaacgaggtgcccaagagaagaaaggcatgtcccttcaagaaaaaaaccgaaaacgaggctggtaaaacaagaaactccgttccgtgtctgtaagacgccatagtctatgcccatgcccatatcgcaaaaaaagaaaaaacaaaaaacaaaaaagcaaggaaatgccgaatcgtatgcaggaagcaatgcagaaatcggtcgaaacaccttgccaaccggcataaaagcacaaaataaagcgcaaaaacaaagaataagagaagctcaaggttgaaggtgcctgaaacacaagaacaaagcaggcgggtatctcaataagaggttcatgcaaatgacgaaaatattatttcaagccatgacgggacgacgaggcgcaatgggaatcgccttgggtcccgccgagatttcaagggtagacatgtcgatatcgttggtgtcatacttctggccgttctgtggctgtatggccttagatacgaggactggctgagaagcactaggaatttcatcgtcgcccacggtgctgcagacaaagcgttcctcgttgagagggatgccgccaaacattaagcccagctgttgcagaagcgcgacgaaatgagcatgtaattcggtaaagatgtattcattgccgacgatttcggccaaattacgggcacgaatctgaccggccgcgcgccggcccgccggggccatacccccgcccgggggggagggggaannnnnnnnnnnnnnnnnnnnnnnnnnnnnnnnnnnnnnnnnnnnnnnnnnnnnnnnnnnnnnnnnnnnnnnnnnnnnnnnnnnnnnnnnnnnnnnnnnnnnnnnnnnnnnnnnnnnnnnnnnnnnnnnnnnnnnnnnnnnnnnnnnnncccccggccggtgaggaaggatgaaacgggagggtactggcgaccggcctgtcttgggttgttctgctcatcgcgggtcttctcgtcttcctggaagcgttcagcagcgcggacaatgctagtggcgatgcggccgaatgcacgccagatgatgggacatgcgcggaatgctcttccggcatctcgtcccgccaatgcgaccagtgcataactacgtcgcttgccgcgggccatggggtccggcagacggaaaatgtaggcaatggtgtaaccggcgactccgtcgccgaagcagatcgggccggacgaaagtccccggggcaggagctcacagctcagggtgcgaatagaggagcgtcggagaagagcatagtcggcggggttaggcggcccgcgctgggagagataggtatggatgtgagtgtggcatgaagaatcggaggcaaccgaggcagagtgaagtgattcgggaggagaagcatgagtgtgatagtcggtctcatcatccacctcggaatggttgttgccacatgagtaaacgagctcgcgcgagcgaagcaccggactagtagaattgcctttggcatcgcgacttccaggcgccccgggtggcagctgtttgctcacattttctggcagagacaagctgcaactcgcgcaggtgtcgccattcacaccacctcggctggatttttcatcgggtgaggtcggatgtcccttgagaaagtatgggtgatcttcaattctaggcgacttggactcggcagatttattcgatcgagtctcatcgaagcgcgattcatgtgaagccggggtaccctggggagagtgatcgggttcggggtgacattgcggacatgaaaaaggtaagacctgcgagcatatgatagaggttggaccatgcacctcgcagaagtgcgtcaaagaaagctgcccaagtcagtctaagctcacggatatactttttttatactcacaatgaaatccatggtggacctgatcaagcaacaaccagcatctttagtccattgtcccaaggcatgctgtgactggataatgacgaaaggccggtatgcgggtccacacagcgaccagttccaggggggggggagaaggttaaaaaaaggcaaactaaaaaagaggcgaagaaagagaagggggtttcgagttgagatattaaaaagaaagagaagtacggagtagtggagttgtgatgtgataaataagaagacaagcaataataatcgaaggggctaaggccctgggggggaacttcttcggtggaagcccgggagttgcgctttcgggaacttcccaaatggaaggtcgatggaagcaaagaacgtcgaatccacttggtttcggattttcgttcgtttcgtttctattctttcgtcttcgcttcttatatcttatatctcgctttatctcttcccttgaatggctgtacttcactctagttacaccacccttccggatgtcttccgatcacattctttcatgctcctctcctggattgctgcatgtgaaagtcattataaaatcgggccgaccattaatattcctgggtttccgtgctttgcctagcgccttgtcccgaggggctgttctcgtttgcccttggaccgttgcgtacaagtggagatagtggctgcaaacaggggctctattgtggaaatatgtgtggtaccaatgatcgtgcagagaatttgactgaatattacggagtacatctatgatcttcatcttgatacatatatcaatccatacaatctatatcaatgaattcaaaggtttgatatgatctatcagaggaatcgacaggggtaggggctcaccgcttcctctctcagcctcctgtatagatgtagcttctcttttttttttcccctctcacttctcatgttactcaaaaatcagcatgtgtcaaatcagtcgacagccgtctctattccagccatctgcccggtggatttctcggggagtaatctggagataactccgtgttaggggcacggcaaggaggtaaagggaagaattccctgtcctccgatttgctggtggacgtcatcgtattggatgtgtacaatatacataatttcatgggctacactccctgacctctggacactggacagacgatctttggatcccaaaaagatgctcatctttccccaagtgggacaccaaacagttccgtggaaaagtgggaatcggggccgattccatgttagcgtgttcagcagggacctaaaactttgtgttgggatttccaagcctccgggagtcgtagggtcatcgttgatatcccttttccccgttacattatcgtctgcgatattcaatatactcgaggcgaaggatctccaacataatccccctttcatccggatgagggtgttcttcggagttaaactccgtcaaatattgactttgtattccatccgtccaaatggcaaacggaggtttaatgtgcatctccgatcctatttcgtccaccgggtgagcatatcttttccaggctgtttccaaaagatgaaacagaccttgatactccgaaataggagccccggcattgggccggattcctaaatcctagatccttgccgacatacgaagccaggtgacctccgtacggactacggagtagtcgcacactaagtacggattactccgtacgctaggtggcactagtggtgtactccatacaatgtgtcaaatcctgtcgtctagttaccctttagtgatataccccggctcattccttcatcccggctactatgtcatctcaccctatcacgccgcgggcattattgatttcccatcgcttttaatttaggattgagggatttaagatactatttgtaacggaaaacgaaaggaaccgtaaacccactcgacaacccactgacgagcggatccccttattaatctcgccaccaaataagcacacgacacttgaccggcgtttggcaggcggagtacgcagtaccgaatatctattcccgcactgagggcggaatgggtttccctacgttatacagaacgtagtggtatacccacatgggcatggactcgactcacataaaacaccgactcatgtgttccacaatcaagatctactgagtacacgtgagacaaaaatggatatgttgtattactgtataccttatatactactccgtactccgtgtaatagggttatccacccacgaaccggatacccgattgttttgggaaggtggtttatgtatttcgtacgtaaacgccaatatggttttcatgcagaagtggatcggcaatgagacattcttatattggcccgaggtcaggcacaatcggcaagcccaaacacttggctcgatccaagacattgacgatctagccacgtgggatttttaaagtactagattgatgatcagcgtcatagatgcaatgcataggtaccacatacattcgagtatctacaacaccgaacaatatacggagtatgtatacgatcattggaatcggctgcacggccttgataatagcaggtcacacgatctggtcaccactcgactccacagaaccgttgctccatcgacaatttcgccctaatatatatgggtactacggagctctcgccagctgtcgccaccctgcgggtatgccagtctgcatacatagcttatcggtttgaataatatttatcatgcagctttagctagccccactagcgctagttggcaagtttattcaagctgctagggaccgtcccgttgaaccatatatcctagggagtggaacgtgtttagtctgtatgtggccaagttctatgtgaatttgcatatacacatacatagaaggcgcgagggtctagcagacatttaatttatttccgacttaattacatctttgaaaggatatgtaattgatccgtagttaacctagagaaaacatatcaaggcaccaaggcctcattagccgccctaggcggaattattgttaagcccgacctagatcacatagttgaatccacctgaaagatggaatcataatgtttttttttcttgtttttccatcaatagccagcatggcacttgaaggatgtcggttcggccgcgtcgccaaccctctcatcccctgcggcgggggtgtaaggcgatatcatagacctcggaaaccatattgactagcaaccacaataggaacaacccctgtctttggtcgacggatcgctttgtctaactaaacgagacacttcagtcgatcgcatggggtggcattaaatccattgcagattcagagtctgttcttcctttctcgggcatgtcgaatgatgactccgcatagctcgagcatgtactatcatcttcaaggtcgatcatatttgggcatgcgcatgttcatcattgacagcatattgcccgccggaccggaggctccagcttggccctgaagactctccagcaaattcttagcgaggttgatgttgatgttctcatcctcgtcatcctcattggagatcttggcagcctttcctttggatgtacttgcctcagaagacaattcttgcgggcgccggttgagatcgagcacacccgtaccttgcaattccgcctccattcgtcgggaaagctccttgatctgctccgtgtcgtcttccccgtccgagtcaagctcttccactcgtttgcggatggaatcgggtgcagagggcatgcccatcatttctttcatcattctagagaattcctcttcgttgaatgatgcatccttatcctcgccttcactgtcaacttcctcgtcatcatcatcatcgtcgacgtcggaatccgactcaaagtcatcaatgaaatcggcaccatcgaagcccgctgagttgtcattcaggaactcttcaaatcgagccacgatccgttgaagattttcctgggcaccagcgtcaccgaatttgccagcatctgctccctttccttcacctctccctttgagctctgactccaaatcctcatagttgatatccagccatttttcatcgtcttctcgcttatcccaggtttcttggatttcttgatcggtcggaagggtttcatcacctgtgtccacatcctcgagcaggaacttcatttccctgactgcaggcttatcttgattttgggggtcgtacagcagcatctcgaacccacacgcaagtttcatccccgcttccgcccgctcatatgctttgtgatcctcggttgggggcaatttgcccgcccaggtctttggcaccggaaattcctggcttttgagttgcgcatatccgacacgggtaaaccgaacactaacgtcgaccaagtcatccggcttgaaaacaaggtcggacgcatccttcgctcgtaatggtcgcatggcgatcggatcacgaacatagaacgcctccaccgcaggcgagatatatgctggtttttgatgtaggagaaatgcgaccttgcgaggaattgtaatgatggcagagtggaggttttcgctgatttgctgagggtacttgcgcagacggtaaaaggcctcttcttgaattattgtcgagcgaagaaggcgaccgggttcattctggataatctttcgtgcctctgggagtgagattttctccgtgacctgtctcttcgcctcctgcttaggcttgatgattcggagctctccttggttaatccacacctatagattggctggttagcatgatatcttgaataagccgacacgaatcaacaagccatagctcaccctattgtctgcgacatctggctctatccatgctgggagtgttcccgcagcctcaatcagaagaaattcgccatcgccatccgccactttgacccagatatctttgtgccgcttagttagttcacggagtaagtacacaatgacccattcatcttcgatagagtcaccaaaggtggtgcgaccctgtagtgaggtgattcctaaatcccgcgacaattagctttagcgctattcagagagaggtcaagagttctgtaccatattcttttgtaatttccaatcgaaaggcatcacgctgccaaatgtaatctttgagcaagtctttggttaaatcggctgctgtacgttgcacctccaacaatcgcgcccgggtctcggcagcttcatcgataacggcgggggtggggggcgggatatgataaattgagtattcgaccgcgtcgtcagggagctctggttttgggataggacggaaggttgattggaaccatgcgagatcctcctcagaagtcatggctgatcttatgctcttaaagaccagagatgacctcatgcattcttctgatagaaaaaagcaaaagcggcgaaattcacatcccgtgatccatacgctaatccccattaggttagaaatcaacagaggtgtccacgctaaacctaacgcagccggggataactcgcccaaaacacgtctgtgattgtcaggcgtgaacttcctgtctcaaattcgctcctgcccttattgacggtgatggttacgcgctgaaaggttctggcccacctctccctgttcaaatatggccttcccctacatcgacacaccgcgcaccgaatacgacggcaacgcgacttatcttacaactggatttcgcagcgcggggcgacataacctctctgcactcgattctctcgagaattcgttccaaacaccatccaaggacaatgatttgatcaagggtttcgacaaacgcgtcactccgcgcgccggtgcagcttctaagtcaacgagaagcgcgttacgacatcttccagcagcagcccccgggaagggagagtttactccgttaatgaagagcgcgacgaaaaacaaccttttgagaaacatgtctgcagcccgagcaacagacggtccgaaaacaccgggatatcagcgagagacccatcgcagcaacgctcacacacccggcttgcctgctatggacatgtctgatatatacgaggaggatcggacaatggaagaggcaactccggttccacatgcggcaagcagtagtccgcaaagtacaccattgccaggaggtaacgggggagtccttggtgacggagggaataatttgtcgctcaaggaccaagctatggtatgatacatatcccaaccattgggcttgcacgcaactttcttcgggctaatgctgatgttcataggccattgatcgactgagcaaagttaatttcagtctgaagctgaggattcacttcatggaagagcaactgcaaaaagctggaccggaatacaataacgacgccctcaaagagaacagagagctcaagctcttgcgagtaacgatgcaacgcgatatttctcgataccggaagagcctccagcaggcagagaaagatcttaaggactaccagctacagctagtggagttgaaggagaaatcatggagggagcaagcggatcagactgtacaacgcgaaatggatctgatgcgcgaagagcttgagtcgcgtgacctcgaactccgcgaagcgcgcgacgaattgaggcacattaaagatacccaatctcaagagaccgataaacttcgcgacgatattgaggatttagaagcaagcgtgagggagaaagatcggctactcgatcaacgcgaagaagagctcgaggatctgaaacgtaacgccgaggagaatggcgcagcttcagagctccagcttgagctgaaccgtgccaaggagcagatgcaagagctccatgatagtcttgcccaggccaagtccgagatcagagagtcagttgatgccgcaagggaggccgctgaagagaaggctcgtgccgaggaagatttgagagaattgcaggacgaaatgtcgaataagtctttcaccaccaaaggactgagccggcagatggaggacaggaccgaaaagctcgaacaagagatacacgagctgcaacgagagaatggttctctgagaacagaactggagagtaaaagcaaccatgcgactctcctcgaagagcgttatcatactattcagcacggcctagaagataacgccaaccagctggctgaagatcttgctgcaaccaggcgtgatcgcgatcaagtccggcaggaccttaaaactacttctgctcgactacaagaggccttggatgaactccagcgtggagtggacgaaaaggaacttcttcaaactcgtcataatgcgctgaccgacgaatcggggggactacaaatcgaactcgaccgtgcacaatccagaatccgcgaacttcagaaagcggttcaagatgccacatctcgggctcaggatgaagggcacaatattcgctggcagcacaaggcagaactcgaacggctgcaagaggagatcgaaaaccttcaccacgaaattgaggagaaggagggacaatttgcagtcgatcaaagtcgctgggaaagcaccaagcggactctgcaatcagagaaagcatgggcagaaggccaagcggcagacttgaagcgcactattgacacgcttcaggaagccggtagcacatactctgggaaggagtctaggctacaagaggccattgatagcgagaaaaagcgctacacgcaagaaaagtctatgctgaaccgccaaatccaagatctcaaagacgacctcgataagacaagacgtgaccttgatgaaaaacgagacgagcttcttacagcgaagcaggatgctcggctatctagacgcgaagagcaagcacttgcagagaaggtgcgagccctagaagacgaggtgatcgttttacaatcgactctggcggatgagcaagagcttgccaaggatcgacagaatgggacatctgatctagacaaaaacctggaaaagtctattgccgagaggcagaagctccgtgatcagcttgcaaatgctcatgtcgagatatttgacctaaaggcttcggcgcaggagattgaggctgaacgcatcgagctccaagctcaactcgaccgagtccagaacgcagatgacaccacccggtttgatcgcgacaaacttgaactacgcaagactgtgacaagacttgagaacgaacttaaagtactgcgagacaccaaatcgtcccttgaggaccagcttgtctcagaaagtgaacgatttgcagcagaggagggtcgtctttcggctgaaatcgatcgtcttcaggggaaattgcttgctaattcgggtaatcgagatcgagaactgacttcggccaagacgaaggcacagcgcctagagcgtcgcgcccaagaactggaagctcttcttgagcagcagcagcctgtgatggagaatgaacaatctggtacacatggggacctatctttacttcggcacagcctggaggaggctaggaaacgcgaaaagatcctcctccagcgtgaatccaagcagaagtcttccgcgcaaagctataagtcacgagtagaagaattggagaaggatcttcatgatgcgatgatgaacaaattcgagtcacactccccacataattctccatcaaacaagcttcacgaagagctacgcagtctacgaaaacaagtcgctgaagcgcaccgatcccttcagaaggtgaacacgaagaaccgagagctagaacgtgccgcgatgaaagaagaggaccaaaaagacttccatgagctccttagatcctccactctcgaagccgaatcattagccctgaaactttccgaacgggaagcgcgcctgaacgaattgaaaacacatgtgcggcggattcgcgaagaacgagatacccacaaacgtgaggctgaagcagcaaacaaaaatctggatgtgttacaaagacgccacgacgaaatcctcgagaagaactccctttctaagaccaccaacaagaccaaacatgagaaagagatccgaggcctaggcaaggaaatcatctggcttcgtgctcgcctgcatcgtgaggagaaattccgccgtgatcttgcctggagcaagggcttgatggaactgggtgaacgcgtccgagttgcatggttcgtaatcccatctctgccgaatactatttgcaatatagctaacaagttatcaacagcaacgatgccgatctccgcatgatttcagagatgggcgtgcaagcccgtgaccgagctcctgtccgcactccacgccataaactaaaatccgccatatcccttgtgagggccgctgttcgcatgcaaaagatgagcagcgattggaaacgcaccaggaaactaggcgagggcttgaagcgtgccaagactgaaatgctcaagcgccgtgatagctcaaacaagagcttgcttggccagtagccctggagatcggttctatcttatgtcattcgttctgattttgtctcttgttcttccagcgtcgacattctgtcatgagagattcccccgacatgtcttgcaagtatactagtttttttctcgacttgttttgtgattctgtctaccttcttttttagagtgttttacagctggctttgtgccggtttgttcgaatcatttgtgtatagtcatcccgacaaggaatttgatgattcaaaaaccgttcgttactcatttatgtagcgtctgccagtacagaaattgagccttgatgacacctacaaacatgggcgaaagaatcatacaggttgtagtcttgaaagcagtatgtatgctactcgcacgctttcctatgacggagacacttgcggggatagacacttgaaatatttgctcagccaacgcctcgccgttgccaaaagtaattgagaaacgcttctaaacaccgaaatcttcggagacaccgaccaaaaacacaggaatccgagatgaagcaagcgttgacatgggcacagataaagcatatgagaaaataaagagactatgggcaagggcatgggatattcagatttcgtcctctctggacaagccaaggagccatggttttatgctgtcgatgaggtagaaaaattcacatttcggaggccatgatgggaaggatatcgattctttcggaagatacgatcaggcgccttcactaccgaattcttgggtccattcagcgttcctcgtgagatcctctccgctaacggttggccgggagttcttgactgccttgacgaaatccttcagagcaagaggtggctccaaaagcttatctgcatcgatatcgagccagctcatttccactgcgccctcatcccctggtgagcaaggcgtgactttctctacaccctcatcgagtacctatgatggagtcgggtcagtcgctgtggtctgggacggtgagaactgagtatacataccttcttataatgtgttgctccttgaatcttgcggattggctgcattagtgcatcctgcacgcaaatactaatatcgctaccggagtagccttcgctcagatcggccaattggcgatagtcggtctgggtcatttgacacggcgtcgagcccacggctagcatgaacatcttcattcgtgcattgaagtcgggaagactgatgtgtattcttcgctggaatcgtcgccgaatagcagcatccagttgccaagggatattggttgcgcccaaaatcaaaacgcccttcgagtctttgccgacaccgtccatctgtacaagcaattcggtcttgatacgccgtgaggcctcggactctccttcgccacggggtccgcacagcgcatcgacctcgtcgatgaagataatcgcgggcttattctcacgggccatgttaaacaactgtttcacaagtctagacgcgaattagtatgcaactctcgaaactcccgtagataaagatatcgcatacctttcactctcacccatccacttcgagaccaggtcactactgctgacactgaagaatgtgctgtttgcctcagttgccacggctttggcaagataagattttcccgtgcctggaggaccgtagagcaagatacccttccagggttggcgcttgccagtgaacaaatgagggaacttgatgggtagaatgactgcttccttcaatgcttcctttgcgttctccaggccagcaacatcttcccacttgacgttcggcttctccgacagaatagctccttgaagcgccgatcgaagctttttcgcatccgcatcttcgccgttgtcgtcatcttccttcctgtccgattcagtgttgttagcgggaatacataggacaaaagctcacttgctaacactgtttatcacacatatggcggtgctaaaacataaacttttgtccaaagaagttgatacataccctcccttcccactgccttgcgccacctttccatttgcgccaaccgcgctcggttttttccggtcctcagcgaggtggttcttaagcttctccgcgcgatccatatattcgccggcctttgagcggatcatttccttcgatttcgggttcttctcccatttcagggccagcatgaacaactccaatgcggagtagtacatctgataagccttttcgtactcgccatcgttgtcattctcgatcgccttcttgaccgtatcaatcgcccgtcccaggaaatctgtattactcatgacgggcaatgcgggtgctgtctgtagaggtagcaagccgaccgcggaggcagatgtgataaagcggggagaggggaacaagggttagggcaatgggccaaggctggaaggataggcagcgagtgccagaagaaagacttggagcttcttgggtgtagaagaaaagaagaagtgcaaaacagtcctagaatcgagagttgatgagaattggaggggaaaagtgagaggtggaagttgttgacgggcgggatccattgattttccctcctcccacttcacctccaagttcaccatggacgcccagaaacagcttcaagcactttcggaagagttccagggactgcagaacggtatgtctctatatttatttgatgatagcaatagctgctgaccttttccaccacccagagcttgaggttctggtcgatgctcgccagaagctcgaatcgcagcagcaagagaacgaaggcgtgcaggctgagttcgtccagctggacgatgaatccaacatttacaagctcatcggcccggtattgctgaagcaggagaagaccgaagccaccatggccgtcaacagtcggttggagttcattgagaaggagatgttagtgccacttccttgaccactgtgagccaacgagaaatgcgtgctgactgagatgttacagcaagcgaatcgaaggcgagattgatgcgacacaagacaagagcgagaagatgcgctcagaggtaaatcgccctcatccaactgcaatccacaccccactatatgcatattctaacccctcacccagctcatccaactccaaagccaggttcaacaacaggctgctgctgcttcagcctccgcataaggccaaagaactcctagagcctgcaggtgaaaaaggatatatcacccggagatgcaataatatgtggcgtgcgagctacgactaggatggggaccaaccctcaaccgtttcactgtgattcagtacatgcgatatgcaagtcgtgagccccatttgggggtagcccaaggaatgtttgggcgttaaggaccaaatcccaattgagatggggtagcttggaaatgtatgatttgtgcagttgcctgacaccaaaacagcgcatggatcggttcaaaaaagatatacccttgaaaatttaatgcaatgctgtcaaaagtgatcgattgatctttgaatgaatcaaaaaaaatatatatttgcacgatcttttcttaatgccttctagtgagaagatttgaaatagtattcaatttatatcgaggacgcatgtgattgcactcaagaaggccatctgaagcacgcaaagaagctagaggatggatgacttctgatgccatgtgtatattgacaaaattctattcgttgattcataatcaaacatttacatatgggaaacttgatctaggacttgaccagcagactggtaccggtcatctccttgggttgctcgacgcccatggctgcgagaacggtaggtgcaacatcacccaagacaccgtccttcttaaggctccaactctcaggggcgttggccataacaaagggaaccttattaagggtgtgggaggtcttgggggtacccttctcggtgagcatctcctcggcgtttctgtgaatgtgggttaactagcaatcctctttgataggaggttatcgtatttcccagaataacttacccatgatcggcggtgatgaatagaacgtagttgttcttcttgcaggcctcatagatctcaccaatcgccttgtcggtggcagcaacaccctggatggcggcctcgtacacgccagtgtggccaaccatgtcaggaggggcgaagttgttcatgacaaagtcgaacttgttctcgccgaggcgttcagccatcttatcaccgacagcagctgcactcatctttggatcaagatcgtaggtagcaactcggggcgaagggatcatatcgcgcacttctccggggaagaccttctcgataccaccgttgaagaagaaagtgacgtgagcatacttctcagtctccgcaatatggcactgctggaggttcttcttgccgagccattcggccagcacgttacccatatgttgcggggggaaagcaacattgaagttgtagtcagttttgtactgggtcatggtggtaagggagatgttcttggggtaggggaagtccggaaggggggaacggtcatagtcgcccagcagctgagtgatttcacggacacgatccgagcggtagttgaagaagaagagggtatcatcatctatacaggctcaattagttgtcatggcatttcctttcagtttggaccaaacgcaccctggacacggcgctccttgccgccaacaatgatgggcttcaggaactcatcgttctcattcttctcgtagcgctccttgatggtctgtagcgggtccgagctgtcctcgccctcgccagtgaccagacccttgaggccaatctcaacacgctcccagcgcttgtcgcggtccatgatatagtagcggcccacgatagtcgcaatcacaccgacaccgatctcctgggtcttgtcaagcacttgctgcaagaacttgtcggcgctcttagggtcggtatcacgtccatcggcgaagaagtggatgaagacctcgggaatctgcatgtccttggcgacctggagcaaggcgaataggtgagcgatgctggagtgaacaccaccatctgagaccaagcccagaaggtgcagacgtccattgccctcctttgcgcgagtgaaagccttgacaatgctgggcaccttgcccatctcgcccttcttgagggtctggtcaatgcgaacactgtcctgccagacaacacggccagcaccaatgttcaggtgaccgacctcactgttgcccatcagaccctcgggcagaccaactgccagcgaggaggcttctaactcggcatagccttgggcagtcttggagttgggctcagcgaagccggacatgtgtggggtatcggccgcggcgattgcatctccctggggtggggagtcggggcctgcaataccccagccatcaatcacaactttgagacgtacattagcggtatatctttttgaggacctgggtggcagtcgaccatactcaaagcaactttttggtcggccatagtggggtttattatggtggctgaatcacacctagaattatacgacactggtcaattgctgggccaagagaaaatttgaacgattcacttacttttagacggatgtttggagaagaagaatttgaacgactaacgcagataaaaggctgccggtgaggggcatgagccccgacgtcaccgtcaccgggtgccaggagcgtatttgctgatctaatcatatgttgcggccgtaggagcgggtgtgtcctccgactcttccctaaaaacttaccccagccgggatctactcgtccttcagatatatatcctcggaatcattcgagtcaacatttccgacaatggcttctcgatccccgccagtgggtactccgctgctaaaatcccctgtgcccgagacgcccttcaaagacgcgccaacaccagtaccacaaacagtaccttttccttcaccacagaccttcgaggtaatcccaccattgcatgggattctttctcgcttgctctcctccaaaggtcagcaaagcggtccatcagacgcacctggggatacaacaggtgtcccaggagcttcccaggcacagacccaacaagcaccttcgaacatccccaatggcgggcacaacggcaacaatacatcatcacatgccgtaccagaagtatcggtcctcggttcaagcgctcatccgccgctcgatgtgaaaaacctccctaccgaaactagctctgtcaggattcgaatccagaaggctcgtacagtcgtcgaagggctaccagatgtgcatcggtctgtcaatgaccaacaaagagaaattgcagaactagaggatcgtgtgagacgtttgcgctctatcatctctgacttcgggtatcgagcagggataccacatgaggacaccacaaggaccttggaagcataaagctcgaaaccagaggatctcgggctacaatcggaactcccaagttacccaggtgctgcaggattttgagattgatttattcggcgtttataaggaaataccctggtgtttttagcgatcatttcaagatagcaaaggctccatcatttcatgagctgtggcaaatctagcaattcatactcctagtttctcttctttctttttttcaaggaattcattcttgtttgaacctccagccaatctagttcgatttgccgcaccaatttacaaattttatagccaaaaccctaatccggccaactgtctccgatatcgttcggtgggttaaagttcagggcctgaggcaacggaagatccctcccccaccacttgcatttattttttccccttctcttcacctaccatcctccatatcaattttttctgtttacctcataagacagattaccatacttcatcatgtcttacgctctttccgagtcccaccgggacgtgagtatcacaactgccctcattttcagcatctagatcgttgactcatcgattatagcaaatgcacaactccctcgtggccagtgatccggagattgctgccctcatggtacgtcgaaactatataccattgagacctgcagtgaaatgcattgtctccaccagaaaattcggctgtgctaattcttctactcgtacaggaaaaggaaatccagcgtcagcgtgagtcaatcgtcctgattgcctccgagaacttcacttctcgtgctgtcttcgatgccctcggttcgcccatgtgcaacaagtactccgagggttaccccggtgctcgttactacggtggcaaccagcatatcgacgccattgagatcacctgccagcagcgtgctctcaaggcattcaacctcgaccccgccaagtggggcgtcaacgtccagtgcctttctggtagccccgccaacctccaggtctaccaggctctcatgcgtccccatgaccgtttgatgggcttggatctcccccacggcggtcacttgagccacggctaccagaccccctccagaaagatctctgccgtttccacctactttgagaccttcccttaccgtgtcgaccttgagaccggtatcattgactatgacactcttgagcgtaacgccgagatgtaccgccccaagtgtctggttgctggtacctccgcctactgccgtctgattgactacaagcgcatgcgcgagattgccgataaggttggcgcctacctcatcgtcgatatggctcacatctccggcctgatcgccgctggtgtcattccctctcccttcgagtacgccgatgtggtgaccaccaccactcacaagtctctccgtggcccccgtggcgccatgatcttcttccgcaagggtgtccgcagcaccgataagaacggcaaggatatcctttacgacctcgagaaccctatcaacttctccgtcttccctggtcaccaaggtggtccccacaaccacaccatcactgctctggccgttgctctcaagcaggctgacacccctgagttcaagcagtaccagcagcaggttatcaagaatgccaaggctctcgaagaggagttcaaggttcttggtcacaagctcgtctcggacggcactgacagccacatggttctcgttgacctccgcgccaacaaccttgatggagctcgtgttgaggccgttcttgagcagatcaacattgcctgtaacaagaactccatccctggtgacaagtcagccctcactccttgcggtattcgcattggtgctcccgccatgacttcccgtggtatgggtgaggaggacttcaagcgcattgctcgctacattgatcagtctatcaccctctgcaagaagatccagagtgagctccccaaggatgccaacaagctcaaggacttcaaggccaaggttgccgatgagagcgttcctgagatccttgctcttcgcaaggatatctctcagtgggccagcaccttccctctccccgtttaaatgggatattgaggacggagtatgagttacggaaaaaataaagagggatctgaatcaggatcccacgagttcaacatcatttcgtataacaaaagaaaaatacacgggtgcgtttttaggggttaattaccggtctgctttttcaacctgacgcgggtcattgggatatgggaatgcttttttgcatgtgaaacgagcaattgttttttttttcggcggatgggcctcgcacttattcaacagcgggctcacatgaatttctgagggggaaaaagttcaacattaattgggcgtcctatgtacattctacaatctgttctcaacacaaggatctctagaatccaaggattattttcttctctgctttatctttccaaggttcctgatacggtcctattatctatacatgtaagaataagtcgtgtaaaccttttctggttagttttgcccgacttcgagccctatacttggcgcgcgatatggccgttgaaagcacataaacattgtagcggcgcagtgccgttattggcttgtcctggttcaaatcttagataaaaagtctttcgaaaagtccaccacaaagacattactcggccgcattagcggccgaatattcttgttcctcatatttagatggagaaagagcgaaccgctacggatgtatggatctagtaaatattcatgcctcaacggaaacatctccgtgcgaattcattgttcaagatccctactccaactatcctctgaatttttgactgcatcatgctctcagttctcccaggcgcgtgaaaagctcaccatccgctcagccgcatctggctggctgagaatttcgcccctcgggtcttctccaagatcctcctcccatactgtctgcggctcggaattggccttcaggttattgtacaggcacatccgcaggtgccaacgaagcaggtcggcgctcatacgccaggttccactccgagcagagtctctgagacgagtaccaccaattcctgtaggaaccggtccgaatacgatgatcttgtagttagcctatgttcacaaccattagtatataccgacaaaatatcgtatatggaaagtctcacatctgggtcaatccctagttcgatactatcaaatagggagtggatatctgcgctgaggaggagtccattctgagcagagtatatacgtgacttcccgatctcggtctcggggagagggtccgtgatatactgctggtatccatctcgtctctactcttccatactgctcacggggaatatatgtgtagcatcaaggtcgcggaaagggtctttaaaactgcttgccctattctgcccagtgattgcacagcaaccgtctctttgacggaggctattacggaatttcgtttgctatagaaatgattagcactggctgtttatgtttttagtcatttctacgtctactttaccagacgactccattcactccggccctgggattgggaatcggggtcttgagttccggtatcttgagttctgacacggcggggcgcatagttggttgtcagctcgattaattggtgccctagctatacgattctcagccttggaaaacctagttatgagacgtatcaaacacacttagatccaaacccatgtagttaccaggcgccaccgaaatcccactgttaagctggagtgcagtggtaccttgtgtgttattggctcctaacttataaaattcccgctcgcttgggttatgaaagacgaatgtgaatgaacagtatcgatagagcatctccggagagatatgtcgatcttgttgggcagttgggattgccagggctataacaaggctgtattagtcgcactggttcctatgaggctatcgtgacttacaggcaagaagagcgccgttgctattataaacctggaggtttaactgcgggtacctttgtgattgaagaacaagagctggcatagctgttgccatattggagctgatgaatagagaaacatagaagcggttatactccccaattaggttagcttggctctgatgtcatccgtaaattcctcaggtgtcgatgtatagaatataagtcagccagacactccatctagttatagagagaagtacctgtcagcttgtgttcccgtcttttttggcaactgacctcgatatcgggtttatatcaggatcagaaaccgtgggcttaccattggaaggggttgggggttgcctcttccgagtgtttgtctcggtataagctaaggatggaatagttagaataaatgaaatgtaagtgagaaggaagtgggagataccaatgaactgtaccggggttgcactggcagtacaatgtaaacaagacgcggttgcatagtagaatagtagaaagtcaaaatttacaccacacaccagccacggcaggtatgaaaccaaaatgccagtttatagatgataattagaacgatgacttccaaagaaagcaagaaataagagcaaatagcaagtgagaaaacgcaagtattttgatggagtgcgcaagtggtctgtaccggataccgtaccgcaggctgcagacccaacagccaatgagaagcgcgtatttgtatataaacctcacttttatcacatcaactatgcttcaacaacttcaaaaattgctttataataatcaagggattagaatatataggtgtgagatacaagatgtagggttttttgactactcgtatgtaaagtagaagtcaggcagaattaaattgataccttctatgtaaggcagaagcaggcagaatcaggcagaagggggggcggtacatttagacgtccacgtgagctccggataactcaaccttggaaggttcctcgttttctctctctctattcctctctctctcggtctcccgacattttgtttttttgctcttttcttttcatctcttgccctttaactctcgttactgcactgctttacaatccccacggccttcctgaatttggcccctcattagagttccaggctccatcgataaggacgcaatatcttatcgctccggtccctcacggagggcatatacttagatcaatctgcgtttgattaaaaaccggaaacagtgcagtacatcttgaagaagtcaccggcgaaccaagagagaacaggaccttgcccgacatggcgaataccgcccaatgctactattgctttgagtctctcctcgcttcattcgaggatcgcgagcccaccactttggcagccgtagaggctctatgggaacagcacgaacaaactaagaagttttcgagtcttgaagagcaaattgaagaggaagatacaggccgtcagcaatccgtaaatgaactagacgaagatgacgatagccaccaatcgtcccagtcaagtagtcaacccacgaagatgaaactccgcagcatcagtcgtcttcagagccaattctctacctcttccagcatagccacgtcttcgtcggccgcatccaatacatcttccatctcactacagtcgagctcaaccaatatcaccacgccaagtgtggtttccgagaccccccagctgagatcgcctgatcagcgatatcccctgttcgtgacatggaacaccctatcacgaagcggacacaagtctctacgcgggtgcataggcacatttgaggcacaggaacttgcagcggggttgaagtcctacgctttgacctcgtacgtgtgttccgattgaatacccctctctcactacaacgctacaagcaacggtacacccctatctatagatcggactgactcacgtgcgattttgttttagggccttcgatgatacgcgttttgaacccattcctaaatctctcctcccctcactgtcgtgctctcttaccctccttgggtccttcgagccgtgtacagatgccatggactggtctctaggcactcatgggctgcggatctccttcatccaccgcggccgtcgctatggtgccacgtatctccctgacgtcgctgtcgagcagggctggaccaaagaagaaaccgtggagagcttgatgcgcaaggcaggctgggatggtggtagcagcagtactgcacggagactgctacgcggtgcaactgatgggaactccagcgccacacagccttgggaccaggtctcggatttccgtactgtgagataccagggcctcaaggcaagcgctagttattcagaatggcaggaatggcgagagtgggttctcgccctagatgacggggaggaaatcctggaaggcgcggattagaccgctttgcttcttgtcccacatctcaatgctccaattggaactgatgattataatgaccaagatgatacgcttctttcgtgggttttcgatgaacaacttttcggtctgggtgttaataaggaatgacaatggtccgagaattcacggttgtgatgagaatttgatatgatatctcagctctataaagatagacaagtgttttaaaccgagaattatccgagaattattgattataaacactggcatcattcattgtattgataataatgtgataatgcagacattgcaaaggaacccaagcgaaggaaaagcctcagaccatagaagagcagccagtgattgtcctaaatccgaatccgaacatccctacagcagaaacacggcattgacaaaagccgatacatatccatacattctaccgaggggtacggctccacaaaccagcaaccatctccttgactcttcgctcctgggcccggatctgctcctcagtctgcccgcgcgcattaccacggctatcaatctgcatctgagccccgccagcattggccggtgcaggcggaggggcatggtgctcctcctcggtgatatcatccccattgacacgctcaggcttgggatcaacgctcaaaacgccgtccatcatgaagccaccgccctcgcggagcttattgatggcacgcacggtgtcgatagcacggtgcagcgtgcggcgcgcgttgaagttcttcttgaccgttggcagcaggtcttcgcccgagccgaccttgccgctgtcagatgcctggttgacccaagggtgctggagagcttcatgggctgtcatccgtgactgcgggttgactgtcaggcagctgttgataaagttgcgcgcttcctgcgatacaccacgccagtactcaaccggcgtgaaggagtagtctgctgctaagattgcttgcatctcttcgagattggaatcccggtcgaagggtgtgtatccacaaagcaagaagtaggtgatcacgccgatggcccagatatcgctggaagaggatggctgttagtaaaagataaagagaccgtaatgtgatgacttacactggcttgccatgaccgctctttttgaagatttctggtgccatgtatcctggcgttccgcaggttgtagtcaggacatggaactgctcctcgtccatgatcctcgacaatccgaaatcggcaatcaaaagatcggcgttgtcttctggcgtgcggaaaagtaggttttccggctttagatcacggtgcacgatcccgtggtcatgcagataggccacggcagagagcactgcgcggacgaggtctgcagcgtcagactcatagtagctgcctttgcgacagatgcggtcaaatagttccccgcccagcgcgagatcagtgacaagatatactagagagcactcgttagtgagggtgtagctggagctatcatggaaacacacaattgttcatcgtctcgaagtagtcgaccagtgtgaggatgttctggtggcccagtgacaccttcttcaataccgcgatctcattccggacctgtatatttcggaagacgtcagtccatactcttgtcttcgtagtcgtagttctaccggcatacacaccatatgctcccgcccggacatgagacgcttgttgatgaccttcgccgcataatagcgaccggtatcgatgtgcacacattccttcacaacagagtacgaaccagcgcccagtgtcttcccggtcttgtatcggcacggttggaccttcggcttctggccgctcgggggttgtgccgccattgcgaataaaaccaagtgcgggatgcgcgacgcgaattgtggggggatggggaagttgtgcgatgcaaagcgtgagtgaaggattgagcgcagtggtaaaggagttcgactcggtgatgcgctatatatgcctatccttatgtacctgcgcaatccaaagtcagccttgccgtaaagtggcgcaggagtccagtgcgaagacctaaggtgagagtgcgcaaaagatactcacagttgggcgacaaagcctgattacagctatatgggcttatggtttcctcggcggtctttgatgttttccgaggggctgcgggggtttgaagtcgaagatggggaatcccgttggcggggcggctgctgaaacgtcagatgaaactatcaaacaactcaactccaacagcgttggcagttggaatagaaaaatgaatgaatagaaagttgaattaaaggccgagataaatatcaacggcgcgattataggacagggcatttctgcccagttggctagttacatttgccccaacaccagcccaatgcaaaacaaagaaaactcatagaaaatggtacattcaaaatcgttccagcacttcctcgacaatgtgctccaatagttgtagcttgtggaatttggctacgctctccaacacttgtagtttcttctcgatctccttccgatcaactgtcgcagtccatgtaccactgcaagaacagtgctccatgaaatcactgatcttaggattattgcacttcgagcacttgatatcctgcgtctgccattcaacaacaaaaccatggacttggccaatgagaaattcttcagttgccagtcggtcatactcggcatgacagaaagggcatcgccagggctgggcagatttgctggcttctgagctggcatcaggcaaaacatcttcgtcgcgacagaggtcgagatcccgaataaggcagcacgagttgcaggacatttccggcagcttcaagctaccactagggttctcgaatcggccctccttgctgaattctcggacctcgaaaagggcaagaagctcgcgccgcagcaaccgggattccagggttgttgtcttggacaaactcagaacctgcatcagcagtttggtcaactccaaggatgggttgcgtttgtccttgcggccgactagaactcctggtaaaacggggaaggcatagtcggatgcaagctcagggtggagcatctcatcgcgttgtctgcggatcaaccccgagatttgcttcttcaatggctttgagaatcgatcagagagaattgcagtgatctcctcatcgtctgcttcgttggcccgtccgatgggaatctgtgttggccgaggagttgacagatccccgtcttcgagttccggccgtttcaggccgtgcatcagctcgatgtactcgacaatccagtcatggaagatagtctgcatgggcattggcaggaaccggctaagctgccagtgcatcgctgtctcgaggtcctgttcgtcggcctcagtgacctctcgacagcccttgcctccgtagttgtattcatcataccaaacgaggtagtcccagtactccttgatctctagatcgataaagtggaatgaagggttagcgcggattgacttgaggacatactggctgtaggcgtaggcgttgccgacctcggtcttggtcgtttggagaaggaggcgtgtagggctggcaaagatgacgtgggagccaacacgtctgaactctgccatcaatctctggaatgacctccgtgacagtaatcgcacgtagttgtgtagagacctgtcatagagacaggacacagggctttccacccatcgaatcagatgctggaccataatatcggccatgctgttgcctgcacaggcctctgtccaccaatgtttgaccatctctcgaagaacgacaacgccggcagaggcaaatgctttctctgaatagaaaacaccagtatcttcaccgtctccagaaggagcaagtagcgtatcactgccgtccatttcgttgatgatagaagatgtcaggatcgtattgatcgacaaattgcgaacctcgagttcaatgcacactgtggagtaagcacctggtacattgacagatggcatattgaccttgtccaaggcacccaggatgtcatccctttcatagcccgcgtgatcaggacgcgggcctgatgaccaccagagcaccacatttttttgttgcagccgtctagcgtacgagatatcgatgagataccgaggatcctcactttccaggttgcaaagcggaacatcaccgaaccgagcgagcatggtcaagtgctggatccaagaagacaagtataaatagcgcgtgactagacgtcttgcaacgaatgcctgccagccaagtgggggaagttccatatccgaagcttcgggcttcacggacaataatggatactccttcaggatcggaatatcgtgacacaggcggtctttttgttgggattgaatgacaagaacggcaggctgactctcatcatttcgaatctttctgatcagatcaccgacctcaaggtgagccttcctgcgcgtcatcacttgcgtagttttgaaatggatattatcctggtagtcgaacgcatgctgcgattcatcgcctgatgcagcctgtatcttacgtgtgagaagctcggtgtagattttatcgacgttgggaagaccctggacatccctcgtgcggttgagaacgataatgtgcgcctcatttttggcagtcgagaatatcgcgaagacttgtctatccccagagacaatgtgatacaggtagtggaacactaatgacgagtccatcagatagggctgctcggaagatgtgtgaagtaatgtcgaaaggtcgaaacccttgtccaagccgtcacctaggacaccgcgttgctcttcatcgaaggtacaatggcttcctaacttgagcactgctcgagtgcttagcgggatgtttccctcgtaaacaccctcaacgctagggtgctggaagagaatatccatcttgtcggcttctgctagataattctcttctgacaaagacagcttgaacaagtaaacagagggatgcccgttcggtagggtatggttgaccttctcgacttcgcagtctggaacgtcaatgtccggcaaagagtcccgtttcaagttcaagaaaaattgccgtggaactctgacactgagggcatggatcttttggtcaatcaacacaaacgctcgcacaactcccggaacgcccgtctcgcaaagctgcagaacctgccatgtgctgatgtacagcatttgggcttgattgcggaagaaattactcaaagagtccgaagcaacgttgcttcgttcgccaaacagctgacgacggcgaacccgtgcttgtttttggatcttccatttttgcttctgatacttgagaaatccttcatagttatcagacatcgatggcataactgctggcaagctagcgaaggggtcaagagctgcatttgaagcattttctgggtgctttctcttctgggcgaccttggtgggcgttttggatttttgagtcgagctcgcgattgcttcatctagatcgccagcatactgaacgcgatggtcaagtatatttgcattcgtcgacgaaagtggcgtcttctcggacttgctaaatagatcagtcatcttcttttgcttgaacctgtcatccttcgtgttgatccgacgttgcaaccaatcagggtgggcaacccggggcactggatttcgaagcttctgaagcgcagccggaatggtaatcaacttctggatcacggatcctaaacgctctaagtaatagtcccaatcgataaccgttcgaggatccatatcgccggggtcttcttttagccattttcgcaagaagaatcgcttgatgttctcttcagctgaaaatatagcgacaggaatggctctttcagtgacaggtgtattccgtgggcgtgatgagatgatgtacttgcagttgagacctttgtcctttaccatctgttcacccaagaactctgccaggcgttttgccgtcgtgatggatgtggacttttgggaaccgtactcttccaaggtcttggacatgcttcggttttccgaaatgagatcgatcaactcttcatcggccaatgtcgttccatgttcgtataaaacatctaaccaccggtccgcaactcgagcaacagcggcgtaggtctcggcaagattagagccctctaggaagaatttgaagagctgggtctggaagatcttaatcaactttagctctcctcttcgtttaacttcgaatcccttgagttcagctaaagaaccatcgtgattgaagactgcatatcgtttcttcaggttcttgtcttcctccttcgatgttggtaaaatcattgcccggtacggtccatccacttcgaagaagattgaattttcactgtgagtctcatacttgaaagttttcgggtcgacaagtgcctggtactggtgattggtgtatcttgcatggacgaggtggttgagcatgacacaagggtatgagatacccaatttcttcccattcttcagagtgaaggagaagttatctgggaaccctccaggaagcatacaccaaataccatcagtatccaattccaggggacgaccgatgcgttcgacaagctctcttgccatctgaatgatgtgagcgcctgtcagacaagtgacaccagccatttccatggaataccaccgagagccctttcgcatcacatatccgtagaaactattgagaatgaccttgtgcgcaagctgaagagaatcgtacagaataatcatcttcttcgcttgctcgatctcagcggctgagccgcccgacgactgcaaactatcggctttgtttttccaggatttttgcttgcccttgaaatcatatcgtcggtcacggaaatctctgacagtatcgacatagaatggattttctctttggcaaatgatggcctctcgctccattgtcttgctatcgtgaatcttgtggtaaatcttcttgctgtaatcctgcagccgtttcttgaccactccagcctgctcttcgatgctcaattcaccgaatgacctcattggggagttcgggtaccggcctgggaaacgttcatttgctgtggcacgtcggatcatgttatattcatcacgtttggcaggcaagaattcacctcgccatgcccaaggcatgcgtctatcgcaggtttttccgggtcggttgaagtcgcaggcggcacaattcgactcatcaatcaacgagtctggttgcaatcggttggtgatcatgatgttaggatacatagaggcgacgtctaaatggtaaatgaaaggcacttcgtttcggactggatttttcttgagatcgagcaaacgctccacgatttgcgccctgacctcatcatagttcacaacatcgtccatgctttttttctcttcaacctcgatactgaatttgagggcgtggtcgagatcctcgagaagctcatcaatcgcagtaggatcaacggtaaaatgtgtagggatatcacttcggaagacaccagcttcaatactttcgacatggccgccgacgtaggtctccgactcaaggagatgaccttcataaaaagcttctgggggattcttgtgtttgttgggcaagacaatctcatgctggtaggcttgaaccatgagaagcatctcacacaaagttccagttcccttccgcaacgtttcgtcggcgctaaggggaatgatcgtgcagagcgagaagatgaatgggtggacatatttcatgtatagataataggttgcgacagcatcggaaaccgagtattcagctagggtctgtggcctttcactcgcatacggtgtcataagctctgggtcgagttcatccgggtcgtaaccaagctttgcgacagtcacggctttcaaaccacgacttccctgagggaggtaactgtcacggttgacccaggcgaaacagtccatatgcacacagttgtcggcttggtagatgtcctcgctgtttttccggaagccgatctccatatacatgtcaagtcccagaatactggctcttgtctccacaaatggccaatcgaagaagtcaccgttgtatgtcgcgataacggtaggcttggaaattttgatatgctcgaaaaatcgttcaagaactcctttttcattgggttcattgaagatgatgaaaggtccattgtactctggtttgggagtatattcaaagtcatgaatgtcctcagacacaatctctctgttggtaattaagaacccttgcccatcaatcatgtatgaaatcatcataatctgatccattgtggcgtcgggaaatttcagtggtaacttggtacactcgatatcaaaagcgagaacgacaggatcggcacgttgaagccgatcttccaggcaggtcagcgatatcacgccatgatctgcttccacattgtaccactttccaatccgaatatctgcgatgtgtcagcgacaaggcctcaccgagagtcacggaaaatactgacctttgtcaatgcagacccggacatggtatggcacgtcgtattctcgaatatcaacaataaaatcactcgcttgtaggttgccattaggtcgttgctcattaattatttcgtcgtcaaaaaggtcgatgccagcagtcgcactatctatcaattagttcaatgttaagatcgaaacacgtaacacagaacaaacctggtcatttcaacgtatgcgtccatcgcactctcatttttcctgttcttctctgcaagaggaagaatagtcctcctaacctctaaaaggttgctcacgttggcgaagctgagcttcatgtaggtctttcggtagccgagaaggtgatttgggaggttgagatcttctttctcaagtcgcttgaattttttgaccatgccgtcaaaggttcggcgacaccactcttctacctccatttcgtagcctttcttgactgcgatcaagaaataaggatcatattccacggtagctttgaaacttcctccgtcgtcctgcagaaaataataatccacaccggcacgacctccaggcacttctgaatcctcaatcgatgtgctgtgcatgttgaccaaccagccggctcttgtctcgccagactcgaatcgagggaagccgagagtctcatcgatgctgttggccaaccgaatggcctcgaatttctcatcttgggaggttgcctcggtcgagcgtaaggagttgaattggaccgtttttgagcgtcgaggattcgaggatgcagcactagatctgaacttgtttccatacttgctgggcttccgtggaggcattgcgacgcttcgcccggctggacttgttaaaaagtacctctagggagggaccagagtagaacatggaatgcgcacttggtaaatttcagatcaaacaagagaaggaataaagtataggtaggcacaaaaaaagatctggttctggggctaattgtgcctctaggagggtccagcaatggcttacgatctgctctaatcaaatcaatttcgatggtcccgacgcgttcgcgtaccgcccacgcgcgtccaaagtgttagtcagccttccggaataaccagccactttgggatagtctggattatctatactcccgatattgatgatcttcttcaatagcggacgaagacagctagtggacatctagaagcaagtcactctacacatctatggcggaagactcacgagactccagcactcttttgaaggctggtagcaacacacaaataccaaatgacctggccgattcgcaaaaaccgaaatacaatccgtctcagtcacaaactggaaagctatgggatgccttcggaaaccccgaggaaccggcgaatgcgctcgcccgagcaacatataagcctcggggcaaggaccctaaggatgttccatactccgagatcattggatcattcccggtctccgaaatgaccacccttcacaaaagaccgtgtgcacgagaatccttgttgactggcattggtgtcggattcggagttggtggtctacggggtgtgctcaaaggtatatctacattctttcggtattcggataccggaatcatggggctaatgtgtgcatgcaggacggtactatctatggtctgctggaaactgggctgtcggcatgtttgcgatcagttcattggcctcatatgaatactgccgctggcgacgaaataacgaattgagtggtatggcagaagcgctcgatctcatgaaccaactgaaggccaagaaacaacgtgagaaggatacggcagtggaggaagcggcattgcgcgcgcgtcttgctgaggaggaaaagaagagcaagagttggactaatccctccaactacaaattctggtaatgctggtgaggcatgaaaaggagtcgtggagttcatgaagtgtttcgaaaactgtatattccgatcaatagatcaagatcaagtagtgatcgacgtcatgtcataagtcatctctgtgtatcatagctctctgcaaagttcattccaattaatcatcgttggagtctcccacttgtccgaaagagaaaaaaatgtaaaccgcccatatgcctgcctttcaagaggaaaacgccgaagtaaagatatccaaaatgtgtctgcatattgcgcagctctgattaccccgctagaaattgaatttcactcgcttctggattgcaccttcgttcatgccgcgcaatttatctagctcaacgccatccctcctcctttcgcgtcgtctttcacgagcctcccgggcttcacgattcttccattctgccacttgcttttgccgcttctgtgatctttcccatgcgattgaagcggtgggcttgaagcctataccgttgatcccatatccatcatccgttgggtctgatggattgtggccagttatttccgagtcatgccatacaagtgggtcttcttcagacggagtgtccgcgagaggaggggatagtcgttgcttgcgtttagatggtgacgagggattcaagttcttccgagagaaagtggctgcctttttctttgagggggaattgggcaaagaagtcggatcctgtgttgcgggcagctcgaatcgcagggcttggcggtcgctgggttcgctgctagtgaccggtagggcttcaggcatagtctggagctcgtggctgtcaggctcgcatgctttttgaggcggtagatccaaagatccctgctgtgagatgccagtcaaggtctcagagtccgaaagaaggtcgccacggatggccaactctccgaatcgtccagccactgtagtgcgaggactgtagctttccagctcgtcctcgtcctgaagtggaacctcttggaaactgtcaatagaggtggtcgatgtgggtgatgaagagggactatagcaatctgattcagatggctctcgtttgcgcttgggagaaaaagatgaaggtaagcctgtcggcatcatactgaaaacggacgtagtggggacgtcaccgagcaaccggatggatctcatttgtaaataaatagggtatccaccaccaagttgttctcaggaaatgaagctattcattctgcagagcccggaggtcagggctgagagggggtttggtcttgggcatgcggcattgaatcagactgtggggtacctccgtacaaggatcgccacccgcgcatacaacatacatcaagagattattatgtatctttagtctcgtttgtcctgttctgcaaggaatgaaaatagcttcccttgagagtagaagtcctactggctgaaaacatgatgaacaacttaaaacacttaattgaaaatatcagagcagcgatagtcagagctgctgaggcaaaaaggcctggtaataatttacaaatacctgcaagccgtaccaatcgagtcatgaagacaaaatcaaaacctaacgccatgacgaagactcccaagtcaaacacattgcgcatctaggccttttgcttcttcttggagggctcggcatccgtgtcgtgcttgcgcttcttcttcttgtcggactcgccctcaccacccacggactttctcttctctttcttttccttcttctccttcttttctttcttctctttcttctccttcttctccaccttagcctcagcgacttcggcatcctccatttccgcatcgctctggtcggcatcgacatcgaggtcagccagcacggcatccatggcgtttttctgcaaagtattagtctttaagtgttcatttcttagggtatatagaggtcaacataccatggcaacctcgttcttagtaggggcagcaccggaggagtagaattccaagcgctcctcaacctggctcttcagggcctcaccgaacttggtgttaggcgcctctgagaagttgtcaatgcgggaagcaattgaacacttgttggcgaggaaacgggagattctgcccttgttcttggggccagcgcgggcgatgaaggaagagtggtacagcagaccatacttgggggtgtttcccttggtcttcaaggcacggaaaagagccttctcggcaccaagaatctgaacggtagaggcggggtacttggagaggttggtcaagctaccggcgtgggagatcagacgggcgccgacgatttcaccgatcagggcggcaaggttaggagcgacgacgctcatcttggcaacaaggtaagcgtaaagagacttgcggtacttggcgagcttgacaacgcgctcggcgaaagcaacaacattctccatatcagcctcggagatctcttggcccatactagtcttagcagcatcaataatgctctgggcaacagcctcgtcatcctcaacaagggtggcaatgtcgtgcagacgttcgttggtcagggcttgcttatccttgatgaaaagggcgagctcggcgtagcgctggttgtcagagacaatcttgacgagctcggggaagtgccacgagtaccattcgcgaactctcatggagaaggtgttgatggccttatcgagctgatccagaatggcgatagcctggatgatgtggttgtcgtcacgctggacggagaactttaccttagcgcgggagtaagcgtgaccgagaccgagctgggcagtgtccatgtcaccatcgcgcagctgcttgaggagtttaccagcgtggagacgaataccacgaagcatatcctgaacgacctcgctggtatcgccagtctcacattccacgaatgagaaagcggacttgatgcttcctgccaaagccttgtcggcaagacccaggatcaccttcttcttcttgttcggcttggggaggttcaattcaaggaaagaaactagagtatcggatgcgacaccttcggagatgtcattgatttctccaagagcctgcttgttgttcctagaaattgttagtgggcgataaaaaaatgaaaaccttttcgtttagatagatagagcgtactcgaagggcaagaagctggaaagttcgaccatcttgccgaacctagcaaggtcattgacaccctcctgaacttccttcaaggcattgccaacagaatcaccctggtgggtaaccttgaaaagcgagtaacccatagggccctcgaaaagtaggaaatcggccatcgtgttagcgccaatacaaggtcaatcacaaaataatgataagaacttgtaacaccggccagaaaacctcgcaaagtgcaattcgatggggttgctggtgaggttggcgacggctggaatggacaatttttttttctcgccgctagtgcgaatcctaaggcagcgaaccggaggtatgacggtcggcctcggagcggacgtttacccgtcccgctgatataaccacgtgatcatatcgatgctcgaatgtgggctttttggccgcggacctaacgtggaacaagctctctatcatcccttaatttaatatttttgagttactggacgtgataccctgccattcattacctgggagatgtctgcaactcaactacttaaccccaaggcggagtcgagggtatggaaaatattcccagatggcccctcaatgatatgcccgcacactaacatttcacgcagcggagaggagaggccttgaaggtaaacatcggtgccggtgaaggtcttcaggatgtcctcaagtccaacctgggtccttcgggaactctcaagatgtgagttttctccgaatacacctgacatacaaaggcaacggaactgacaaaactcaggctggttgatggtgcaggcgcagtacgaaacccccgattcctctcgaacgacaccaaacatcccttttctgatacaagcttgctattatagatcaaattaaccaaggatggaaacgttctgttgcgggaaatggttcgtttgcccccagaatcccagcatttcgagcttgcgagctaacattaaacagcaaattcaaaaccccacagctgtaagatgaaattgttttcagagtctgatacgtgttgctgacaaaactgaaaggttatgatcgctcgcgctgcgaccgcacaagatgatatcaccggtgatggaacaacatctgtcgtcctgctagtaggagagcttttgaagcaagccgagcgtcatatctccgagggtctgcacccccgtgtcatcactgatggctacgagattgccaagaccgaggccttgaaagtatgtgttgcagattgaaagtcgaatgtccagatgggtctaacacattacctacagttcctagaaaacttcaagctcgagcgccccattgaccgggagctgttgctttctgtcgcccgtacctccctctcaaccaagcttaacagtgctctcgctgagaagcttacccccgacatcgtcgatgccgtgctcgccatttacaaagcccctgagaagcctgatttgcacatggttgagatcatgacgatgcaacaccggtcgtcatcggatacccagcttattcgcggtcttgccttggaccacggtgccagacaccccgacatgcccaagcgggtggagaacgctttcattctgacattgaacgtcagtctggaatacgagaagtcggaaattaactccggattctactactccaacgccgagcagagagataaactggtggagagtgagcgcaagtttgtggatgcgaagctgcagaagattgtggacctcaagaaggaggtttgtggaaacgaccccaacaagggattcgtcgttatcaaccagaagggtatcgatcccctcagcttggatgttcttgtcaagaacggcattttcgctcttcgacgagcaaagcgcagaaacatggagcgtctgcagctagtctgtggtggaacagctcagaacagtgttgaggatctgtctccggatattcttgggtgggctggtctggtctacgagcatcagcttggtgaggagaagttcacatttgttgaagaggtcaaggatcctaagtcggtgactatcctcattaagggtcctaatggacacaccatcaaccaggttaaggatgccgttcgtgatggtttgcgctctgtctacaacaccattgtcgatggctgcgtcattcccggagctggtgcattccaagttgcatgtgccgtgcacctgcagtctcaagccttcaccaagaccgtcaagggtaaggccaagtggggtgttggtgcattcgctgatgcccttctgatcatccctaaaacccttgctgcgaactcaggccacgatatccaggattcgctggctgctcttcacgacgaggcaactgatggtaacgttgtcggcttgaatctggtcactggagagcccatggatcccgtccaagagggtgtttttgattccttccgtgttctgcgcaactgcatcgcttccagcacaggcatcgcatctaacctcctcttgtgcgatgagctcctgaaggctcggcagatgagcaaatccggtgccggtggccccggtggtcaggaagagtaatgcactttctcatttacgaagtcaggaggttcatgtaaagtttaaaagggttaaagacttgattccctcacggagtcaggggccaagagccaatctattcaaaaatgcacaaacttcacgttgcttctcattgtcgtcgttagatggaaatacgtaatcagcgctatcgtacataaacttggaagctgtctcgttgggagaattagtcttcttccgagctaacgctttggccatccccatcagacacattctcgcggggccaatgtccctcaaagccttcttctctgactgggtcgtccagggagagatgatgtgcttgagcccactcccagacatcggattttcgaatggtgaccatctgacctggtggtgtagtattgtcctccgcagctgtacgagtggatttacgttttttcggggtggcctgaggttcaaataaccccatactcttgagtgcagtgatcacatcctcggtcaacataccagttcccaggccgagttcttcgactgtaatggtctcgcgcaaaggtctcttgcgggagcctttaggggttgagctgggcttctgttggtcggtttcaagggagttgccgctaggtttaccgcggagtaagaatcgggcaatccgttcggcccagaaacggacataacttttgtggcccagctcacttagtggcttctctggtccaccgatgcacccaccatttgagtcccatccgctgagcttgtagctgacccccatcaacaacttcccaagctgcttatgttggtaaggcgggaagatcaaaatacaggcaagattgttcgcgtcccatgagagtttctcttttgaaaagaaaccgagcacaaagtagctgtcggggtcatccgggtcggtgaaggtgaggatgtagtacaggaaggttgcgacgtcgaaaaagactgtcttgtggtcgaggaagagtttcgcaaaaagggacagattctgtccgaaaagtttgtggttttgtccatcaacctcccacactgcaaacccgccatggtcgtagactttcatgcctggtggcgttattcgatgctcgcaggcgcttttgtgttcttcaaagatatcttcatcgcatgagtatcgaaagcaccagcgacagacgtagagtcgatcggcgtccttggcgacgaggtcttcggggtagacggattgattccatggcttgaacaagagatcgcccagtacgacattgttcacgttgcgaccggctggggtctgcaatggcgcagacttcggggtcgccattggattcttatggatatttgagcggcacaacgtgatatctaagttgtcggaatgctaggtttcgggagcgttcaagcgatgtaccgactccaatggaccagccattggtattatcgtggaaatgagacctgtaggtggaaaaaaagagtgggcacgatcgcgcaggcattaggcgaccgttatggaaacatcctctcaataataataaatgtcattcattgcccattgaatccattcaaatgtcccgtagtcggcgcctcagattccaggcgaatatctaatgtcatgtgatcggagcggggatcctccggagagcttcatcatgctctcatgctctctttatcctgttgcctgaacctccctgcttttttagaatttgttgaatttcttggatttccccattccttttgaaaaatccgaacttgaaacctggaagtgttgccacaggcggcagcatatgaatctcgtgatcttttttcccgtttatacactcgccgtctccaaggcctaagaggcatcataattccaacccatttcatatctttatatcaactctttcaactctagtttatcgtttttgtttttgatcctgtaacaccgccacccacctattcgtgttcctgatccgcaaggctcacagtacatcttctctacgatgttgaaacccttccaaatcagaaaccttcgggtatcccaacccgggcagtctgcggattctcgtactcctgcaggagttgtccaaatctctgctacagattacgatgatttggcgtcaaaccatccccgcgcaaggttgacttacatggatgacgatgatgatgacgaaacaatcaccgtaagttcagcacagtgtttatcgatcatcgaaatctcactcttttccttaggttggatccgctttcgagctctctcaacgccttgaggagcccctagacactaacacacagcttgaatccgtcgaactctctccccaagatatccccatgcacatctttgatattcgtcgatcaaactccgtgaccgagttgtggaagcgatttgaagataacgttccaaaacaaggcatggctgatgaaaaggacgagacgcaacctacttctaagactattgttctcgaggagcaacatgaagtcccagctcctcatatcacgatctcgccgtcggtctctagggaccagcctcgatctctcatggaagcattcgaagctgagctagcagacattctcaatgacgctgagtactcgaagagtcgagtacctgaacctgactcgccaccgactgggtcatcaaccaacacagactcagggcgatcccctcatcccgttgagattttggcagcacaggttctagaccacctgatcaacggagccactatggtacaatctgaatggagatcaaaaatacccgagctacagcgacaagtacacaatgctcagaaacaatttgaggctgcacagagaactctgcctcagaatttgcaagcctcattgcggacactactcgccactgttgaggctcacctaagaaccgcttataataatcttccagatggcggaaggcaaatggcagaagatgccttccaggcaggaaggcctgttgctgagaatgctgctgatggttttcgtatgatggcctccgaactcaacgaagtcggaagaacattatttgccgcatttgaaagcgagtttgggcgcgctacaccaacagcctctgcgtcgaccccggcttctgagatgccaaattctagagcaaccgggccgttctttaactctagttcaagcaatgaatctgcggctccgagcactttgtaccagaactcaggcgcacattcttcaagcacagccagaaacgaaaagtcaacggtagactcaggtcatccgcactcatctaatactgcacaagcaggagtaccccctatccaaagttgtcatggtcaacccgcatcccctcactcaaatcattgggcacctcccgcatggcctgctccgtcctggaatccattccaaacttataacgcacccccgcctccgtgtcctccaccaccggcatcgctgccgaacttcacttactggcctcaaaggccacctgcgcctccgcctcttcctacgttcaattccccgttgaaagctacacagacatcgaacgtcatgtctggagaattgaaaaccgattcagcaactaagtccttgtttattgggaatgttggtttcaaggttaccgataagatgatacaggatgtgtttgctgccaagggattccttgtcgaggtggatctcccattagataccgcatcaaaaacacatgcaggcttcggctacgttcatttcccctcggattatccggcttttgctgcaatggaagcattgcaaggtgctgtcattgatggtcactcgataaaccttgagcctatgtatcgttcccccatcgaaggtgtgcgtccggtgcagatttcacccaatgccagtacaaccacacacgacactcagacagacagcgccccggatgagacgagcgatataaccgatgctccctctgagcgaaacagtaccacatcggggccctttgcctccccgcttgctatcaagctacaaaatagtccatccaagcctggcaaaacggataatcagacggaaccgtccgcactacttgattccccaagtgacgatcctgcatttagcgcacgtttcccctcgcttttacccgagacgagtgcacagcataacgatccattgagtggtcgaggtgtttcctcatattcgcacacggagtctggtttcccacctgtgtctcaatgggaagcccaacttctttcaaatcggcaggaacaccgcggagcagaacctataactggtgttttgcatagtcaatcaccaaacgacctagaacaccctgaggtactctcaactcacggttcacccttgcatcctaccccgaaggcatttgctggatctcaaccagcatctcgtctagaggcagccggcaatccgtcatcgatcgttggtgctagacgaccttccgaccatagtaaatcaatgcaagatcaaatcggtcattcttccggtgccaaggagactgtgcgcccagtgctagatgtcaatgacccccagtatgcggtcaaactgaagcgtcgagttactgagcaccaaacttataaaccaaatcattggaacgctgcggagactggccgtcgtaatcccctcggtcattccgcgagcgtgcgtcgtcctgcagacacatgggctcggctgtctaggcgagaacgaaatggtgtatcttctcacgagcgaatccccggaagcttcccagtggacgatacaacgagggtcgaactctccagcactcatgataccaatgttcctgagtcggatgacgggacaatcgaacaatgtgtctctgctcttgtcgacataggctacggggctggacaggagggcggacggtcgaggatggctgtgtatgcagccatggcaaatggtgtcctcacggatgcgattgatatgattgaagaggaaagacagatctatgaacggcggccttcgcagtgaggcatggaatattggcttgctttttttgtttcagggttatataatgacccagtcattcctttagctacagtttagcttgactggacctattgtggcgtcattcattctcagtagggttgaaatcccactttttgctttaatgacttgctaggccaattatccatgggacttttcgagacctcaacctactatgttgcatgtcccataatgaattagtgtatctaccttttaggtgagcttgacttttttttttttaatatccttcttacgtttgggaaagacaaagtgtctgagttggtagaccgtaggagtggcccgttatatataaaccggtgtacaactcaagaacataacagtgaaatgatagctaacgatgtatttatttggagattaattcatttccggaagaacaaattgctaccaacgcaacagcgctctaaaaggatacaatcagtggtctttatagtaatgtacatagtaaatacagagaatgctaatcggaccgacatcaatgccgataagtttcctggcaatctccgaactcccgatcatccaactcacagcagccaggaccttcagcaatgcagatatggcggcgaaccttcgccacatctgtgggcagacttaatcaaagctcaattaattcccgtccctctcttgttcgatgcgcacagatcctccaagccagcaagaacggtggagtttgcagcttcgaggaccaagaaatcaaagtgaatgggttcattcgatctgtacggaaacagaaacgctttgcattcgcagaaatatctgatgggtcgaccgtggtgccattacaggcaattctaaaacccgcgcaagcagcagagtatgttcgcgtgagctgtggtcctcgacttgtttgtccatgaagactaacccgagctttctttagtctgtcaactggaactgcgatcgaaatatcaggcatatggaaagcttgcccaccgggtaaagagcaaactcatgagctccaaacaagcgatgtcaaaattataggcgcagcggacccagaggtgagaccaagagcatttctacagttgttgctcctcacactaaccacgatacatatggttacagacgtttccaatccaaaagaagtaccacagccccgacttcctgcgccagattccacacctccgcattcgaacgcccttcaattctctcctttcacgcttccgatctgagtgcatattccaacttggcaatgtcttccactctcatccagatggagctttcacacaagttcagcctcctcttataacgtcctcagattgtgaaggtgcaggtgagacgttcacattagcaccacgcggtgccgctacacccaccaccgagaacgagcactttttccgagcgccaaaatacctcactgtatcgtcgcagcttcaccttgaagcttatgcggcagagctaggaaacgtctggacattgacacccgtgttccgggcggagaagagcgatacgccacgccatctcagcgagttctacatgctcgaagccgaggtcaatttcatgtccgatcttgactcgctgacagggttagtggaacacctgctacgcgatctaacgcgtcgtctatataatactcctgtgggccaagagatcctgtcggcaaagcggtctggcgagccaggccaggaaaccgcagaggagacgacaggatctctacggcaaagatggaccgatctaatggatgggccaaaatggcaccgggtcacatacacccaagcagtggaaatgctccagcgtgctgtcgccgaagacggagcatcatttgagcattccccgacatgggatggaggtctacaacttgagcatgaaaagtatatcgtcgaggtgctccatcaagggcgtcctgtctttgtgacagactacccgaaatccgtcaagccgttctacatggccccttcgcaagtcgccgatggcagcaacacaaccggagagacagtggcatgtttcgacctgctcctccccgaggtcagcgaagtcgccggaggctctctgcgcgagcatcgcctgcctgatctcattcagaacatgcgtgagcacggtttgatcaagccccgacagattcccgagtcaggtgatacagctccagatgagtcgctgtatccccatctcactcccgacgaggacctgagccacctccaatggtacgctgacctccgacgctgggggtctgctccccatggaggctttgggctcgggtttgatcgattcctcggatatttgactggtgtttccagcgttcgggatattgtatccttcccgcgatacttcggtcgcgctgattgctgagacttatcagaggtatcacccagtgtatgatagatatgtaaaataatgtacatgaaaactaaatagttgaatagagggaaagttggaaacatggaaccgcaagcgacatgagctgatctactgtgcaacttttgactgggcctggatttgctccattgacaatgaatctagtatcaaccggggcccaacgacgctaggaataaagtcgccgattgattcccgaataggaactaagacaggcacttatccgcagacatccgcataatggagcctccgtcgcgctatgtgcccaaatccgactagtgagaatacaagtctcttaccatctgaagctaaaaaaagggcttgtgctaaccggtagtgtccggctcagcttactttgtacattagtctcctttaaccattacgcaattagggcaaaggtcacggtggcaagacatttaccacatgggcgttttattgtcctagagtactccgtaatggaaccaaggaaagacagaagacgaaaacgactgaattccgaccttcatactccgtagatgtcggactatctccgtaagagctaggagcagagcttatttatttacatatgtccccacctttccatgccgatttagcctatcttgtttgctagtcagattttaactttaaatcgtgacttcgcagagctccaggcaaatggatagtcggccgaaaaagaagctggttactgggttatagtgaatattatgacattattggatctagcccctgcccgatcatcctagacagccagtcgaagaagccaaaacaattaaaaatccggaatgctacggatttgcgagagaatattacttccgacaccagtggcctcataccaaacacgggagacatttgtaatgtgatatcaaaaccggatgataccagtctgagcacagagttggatctacgtatgcttactccatattttgacgtgtccagggctaagcatcgaaggaatcaggagtcagacactagaggaactagagtgcgacatatactccgtacaatatacaaacactgcacggacgaaagaaaaatggctgagtttaatttagcgaaggcaaaaataaggcatagatcgtgcattaccaaagcgccaagtgtagacgatcgtttcacgataagagtagctctgcgcaatactccgtagaccgtggcatattgccgtacggagcatagtactccatactcgtatacggaggccatgtacggcagatcttatccctgattttatgcaccggaggtccggaccccaagcaaagccaagcactgtagtctggaaacgaggcgccccacagaccaaatgtaaaaacaatggggcgtggcactagttggggtagtacgtaggttgctgatgattggcaacgtagatgcatatcagtaccgcgattcggaaataggacagcaaggcggatatggcaacggaattaaggacaatcgagtctcggcgtaccccattaggaaaaaaacgtggtcctccgagtggatttggagtattttgactcacgagtcactttatttcggacctcgcttatttatgcctagcatttttggatttataggtttggattgccacttgtccttattattattctgagagccaatgattgtatggctaataataaaaagaccatgatcagattaacgagttacagctatgaatagacgtgtacagccttacaacacagccttgaattaatctatttgactttgataaaatgagccctgattccatgccaattagggggttaggatcagcaggccaaggggtcccaaccttaccagggttaagcataagcagaaagaagttcgggcagtgcgcttgagtagggcatccctgtctgacgtatcacattgcagatagcctacaggagatgtgatttgtggtaataataagtaactagtcaaataatatcccattattttagtatgcacgggtagggtaattgataatccaggatgattacaacctaggtcaaggttacactccaagctaagacaatattacatagttcaaacagatcaaccttcgtattcggttctagcagctccccgaggaaaataatattccgccacatggtcatgtaagacaagcaagttggaaccttggaaatgcctaggtaaagtcaagtaaagttaagtgaaataaaggtacggaagaaacgttaaccataaacctgcagccacaggttccatggttcgcaatgagaaaactggcttttaggcttcgatgacattgtcagccagcctagccactcaaggttggcacccgcttggcattcacaagctcttggccccaagagttaccaaggtgctacttgcccttaatatgtaggcaccagcatttgtcggtgcattgccttttcttagaccgccgtggagtatgatgtgttgaatgttatttataaagttaatattacaaacagaccagaataaaatgaaccccatgcaatgaaacataaccataaccataaattgaattaaattaaaaggaaagaaggaagaaaagccatttcagcatattctctattcatctagacaatggatactttaattatgctagtggagataagctcgtgtgacgtttcacaaaattagttcttggcaacctttaattccagggttgcaacgaatgcatgacaatacaagaaacagttactcgcacgtcatttctagtcgattatagatttgtgtcagttgtatatttgatatctggtctccgactggagagatcaaacactgcagataccttgacttggggtttataacgttagaccggatcactaatcggagattattcatgagcaaaggctgtgtagcggagttacctcttgatatattcaatccgaaggagcccgaggccattaataatagattagcagctaacgaatacagttccagaaggcccacatgaaccacggtcggcgaaacagtcggtttatcccgcaagggtattctatcagctggtgagatatagttagcgagatgtggagctggacccactcaaaaaaaggagtctccgggtaaccggatagacctcaagagcatacgcaatcgatattgtttttctttacggagtacggagtagtgaagtgcatggcagctctcttggattacggagcagaaacccctgaacccagacattggtgtcactatgccctaggtgtggataagggggggcgatgtagacctaataagctggagatgggtttccacctggcaaatgagagacactagactatcccaatgtagcaagacttcgggatcacggctgttaagggtggatccaggcgatcttgggaattcgaaaattcggtcggggcctgagcttctacactaacattgaagtaattgtatggttgcatgctccaggtaagggaatgcctttagtgatctgagttggtatgcttcttttagcgttgaaggaaatagagccgatgttaaggtgaaaatgtaacgattccggctttttctgataatgatcagctgcatcagtctgattgaaacttggaccctgccagttaacctcgatcatttcccagagcctatcattaaccgttaaataattttgactgtggcacaagagcacagcataatcgtacggagtattagtccgctaatccttatatcttgcatattcaatcatacgcaccaaactatatcttccatagcttggtcactcaagccttgtttcttattccattgaacctagagcaaaaaagcggtgcgaccttgcacactccgtatacctggtagacggaagaccgggtcacgaaggtgatgttttagtcacacaggacggcgccatgtgagacatgtaatgcaggcgatataacgtatgtaggaagtacgctgacactatgatcggctcgtgccatgctttctgggaatagagacacatggaccccccagcgttttaaacttcaaatgggctgaagccaaggagaaaatcagctgccaagctggactagcttccccgaaccctattagagtgatccttgtgcaacgggggagtttgttggcgatacgctttcgctggcttgcattattcggcccgtgcgtgacagaatcccgaatagagttatagcgcaagttcaaatatgagaaagatgtttctgacaccttttacgtatgcaatgtaccaatattggatttagaatgtgaggccctacccacctgcgaggctaattaggtacaaggctaaatctgcacggcgaacatgaacggcacggagcgcagactcggaccagttaaccttatcgttgagtcaaggtgtcagcagacatgattcagtggaatcatattttggccgaccgcctggtagttggcggatcatgttagtttaagccattatttattgttcttggtcctacacgaacgttataagtcagatgtgaagcagtgcactttctaatgtagcctgtggctactccgtagtatagccagtcgtaactcatcatgttacgtggcttgctgcctagctcgccgtgcatcattttatgcacgcaaacaatatacgtacaaaataggaccgaccttgagaccgaaacccggagatttcttgatctacaacactccgtatgtatatggagtacggagtacactgcatcggtttagtttatgttttcttttccccgtatcattgctttgatctggactaggattttgtcaagctttgtggtcagcgcagttaaaatccaaacactgcgtcattggacctaatacgagtacgagttacgaggatatgaccactgtggcttaggtttaccatttttagcctatgagatattgaatatctgatataaattaaatgtcccgggtcagattcgctaagatcaaccttgtttggatgtgactcgtatgggatttgcctgccaagggatagggtgctggataaggccacatcggacgtaaccgctcaaactatgtttcgacggggtacataattattaatcaatggctatcctcggtcctattgctaaattccgatcgtcaagtgggcttctattccctggtaggtggaaaattactatgaggactcttctttaagaatggcaattgaattggtgtttcaataacccggttgaatatctaaggtaatatataccgttgactacatactacattgactacgactaccctacaatataagtatgttgtagtccataatcaccaagtcccacaatatagaattgataaagttccccttttgccaataatgaaaatacccaaagtggaggtgtggatgccttataagcgagcataaagttcagcgccggtctcctcgtgttggattaagcttaagagttccgcactaacctttttttgtgaccagagcgccacttttctgacacagaccatttccaatgttttcttttcttgtttcttaccatacggaggattctctgtttattaatgttgatcctattatatttaatctatcaggaatggagccgtgaaggggccaaattaaccttactcgcaagggtttccaaaccccgtaaagccgagccaagagttgcatggcattaactagccaacccggaaaactggttcactccccgtcactgattatattgaatttggttgtagactcacagttatgatccatgacgtgcttagatagctctaacatataattactccgtacaggctacacaatctgaaagcctttgtatagccgtgccacttcagccccatgtcgagaactctcctttccaaggtttcccatgcataaatcgtgtggatttcccagatccattatttccatgtgtaccgaatccaataagaaactaaaataaattaaataattctcttggaatctcggcgtttaacaagttccgttcgatcttttcgcttggatcgcttgacccgctcttcttctctccgcttcccttatttaaccttcttttttatgatttcttcattgtttcttataaagcgttgcgggaacatctcctctttttagttttcctcttttccctcttcttctagctttctctttttctctctttctcgttggtattcactttccgagacaagaacagctaagccattccttcagaaccccggtggagtcatcatagtaggtcgccccccatctctctttgtgccttttagccttggctctctcccttgtccggcattcttatgccttcaagcccacctggcccacaatctctggtctcttcttccattttgggataaagccttgaatcttgaatcggtccaaaaaaaaagaaaaagaatgaaagaatagcctagccgtcttgagctcaaagctcggccttacccacgctggcttccaggcttaccccatactgactcggatcctggttccttttatatttggacctgaaccctattttcgtcctctccacttgcgcctctttccttttcccttagatctaactcattcctctcagacacttttcgtactccatttacccttaaaaatccctttatccttcaacctggcaatcagatcaaatcaaccggggtcgtcggttgactcgagagcttggatggagacgtattacgggcacgttcgcacgcctgcggacgctattattcttttcgaggcttgccgcatcggccttttacctcgcgtgcaacgaagattatcagagaaagagcgacagtccatccgttccggttcggtcttcgtatgggatgagcgagaagcggggatgcggcgatggaccgatgggaagtcatggagcgccagtcgtgtatctggtagcttcttgacttatcgtgaaatggaaggcaaacgcggaggtggcagtgtctctcaaggctctgcttcccgcggaggcaagacgccggagagtcgaggcagtgacgatgagcgcgccgatggaacagatgagggaccagatgggtaccgttacaaaccagatggtttgatgaagcagtctttcagtatcacgacatccaacggtcaacacttgcatctgatcagctattattcacgctcccatccttctgccgccaacttacaacaaccgacttccgatcctgccctgcgtcatgtccgaccccagaaaggtctctatcccgagtcgacagttaatgatcaacaaaatctccctgtcgttacccgtggacctatgccaggcgctgcttacccaataactccgcatcccctcggcgcatacccacgcgtcactcatacacagccatacccccctgcctatgcttggccgcccacccctctggccaccccaccgactgtctcggttcaatatgggcctggtccttcttatctccccccggttggtgccaacggacaccctcattatggcccaccacaccatcagcccccgcatcaacatggtggactcccaccccctccacacgggatgaccagcccctatgatcgaccacatatggaatcaacattacctccagctggaccgccaccacaacaaccaagctacatgaaccggtcgccgcgatcaatacatgagcatgctcacgcccacgctcaagctcaggcccatgctcatgctcaagctcaagctcacgccaacgcacacgctcacgcccatgcccacgagcaacgcaacgcaccggtctacggacatctagttgatcctcgtatggcatcaccacgcgtgccagtccagtccctgacgcagtcaaatggacacgtccacagccctcacctggtgaagcaggagcatcctgccgcgttgtcctctctcaaccccatcgccacatcaccgaaatcttccgatcctgcgagtactggaaatgcagttcctggcatcagctcattgatgaatggtgcagcgttggctcctttccccccatcgactgcctctcccggtggccccgccacgagcttgaatggaaaccccgcacagagctctttcgccgacgggccacgggatatccctaatgagaagatcggattcggaggcgaggatacgagagcgctgcgtcagctggaccgcgccttcatcgcatgaatcgctcgatgaaggttgtttgatggattcactcaatgaaacaaaaaaatctatcttaaccccaacccgctcacagggttgatgcccaacttaacctcacactttatcttcatgtctatgtttctttatttgctgcggctccagggagtcttgctgctgttccagtgatatccttttgttttatctttgtatttgtcattattagcatcttgcatgggtcggggcaattcgaattcttgcttttatgtgatcgggtcatggatacgggttcaatggagccttttcatattatgcattgggatcggtctacacggttgggatacggcttttatttctaaatggactatctgtgtcttgtcaatcgacttgctttttccatctataactttgcgttgtgctctccgtatacttagacgtatctgtgtagacacctgagaactggcttggaatccgtcgtactctcattgctttcgcgtcacatacttcatgtatctatgtacggagctctgcatgctgactttcctatggtaagcctgaacaatcatcaactttgacaagctcgagctatgtcgctttagcttcttttgacgtccaaataaccgacgactcctcggactcccatgttacctaggactccacctcaggcgtctgggcaatgggaatgagaaagtgatatccaagaccagtaatagtgtcgtaatcactgatctatatgggacgtcgtaccttgtgatcatagtgtccctcctaaagtgaatacgcaacgttcgttcgacattcctgaccattttacaatcttacaaatggctgcctccttcgcggatcatgctcatctcgaatcatcgaatcaacctatgagaattgaaatccattccttacgctgctagttattaatgcacgtatcagattacgtggtagaagataagtgatcaaccaaacgtgatgatctagctactgccatgaagctctctaaagagcttcatacgaacaaaaccacaaagatctcatcctccagaatctagaagaaacatctctgcacgtggataaagagactgccaacacggcaagctacctgcgagaggagagaaagaaatgccaaagagaagtctacaaactgcatagggaaacagtgaaagcgcccaaatgcatcagctattcgccggcttcaaccaatctcttggtctgggacgatctccatgggaacaaggtaattgtcaaacctcctcagagatctcattggccattagctcaactctatttgagacctagctattcttatcattccccaatgcctacaccgggagagaaattaaatctcattcggtgtgagctataacattggcctcaaaaacaggaacaagaacaccaaggaatgaaatcatttacgaggctttgcccctgagttctccccgggccgggtaggtgcatgatggtcatgcagaggcagctttgccgaatgcccatctctcgcctaggaataccttgtacattaggaagttctgatctgtcgattcgatgataccaatcacctgaaggagtctgcagaacttcaaaacttaattctgcggtcttttatttgcttggattttggcctggctggacctcgtattctgagactgcttcgggaagatatgtgagggttggatcaggctcatcaaaataggcaaggtatattctgatacagacacgtcgatagagccctggttaatatccatagatcacggcagacaaactcggggaagggctccctacattgagtatagccttgcccagttagattgtgttgccttaaatgacgtatccgcgctacgatctccgttgataaactagtgaagtatctgcaggatcccgtggctgcaatcctcggcgtcaccattcaactagaataccttagaagatctactcggcccataacttctgtactccttttacttgattatctggtggtattactcgtagtatagatcggcacccgtgatatgcctggttccagaagtccctagatattcgcttcgtggagggatgtaatttctcacatctaggttcaacggcggtttcaaaatggaagctggttatcttggttgagaagccctgtctgggtttataggaccctcgaattcccactacatgcggtatacggcatcgggaatgacagttggtacgcctgggttcattttgtgatagagaccaagtcaaacgggatgattctggatttgatgcttgttttgggccaccaacgatggatacatcgatccagtcgcttccgatacgagctttactcgaagtcaatgctgtcacaacaattgtgaacgaagttcatgaacctaccattcgggacaaatcacaacacactggcgttgtgcttattttctaggatattaattgaaataggaacgtgttacatccttcaaattatacgaggaaatctcgctcatgaaccagagtaatgcgattgtcaccaaggagaaacaggtaacctagctcgcaagagaattaaccaatataattcctagtctatctggtcgacttcaactacatagtcataaagcaagagcctaagaaggaccgtgaccttatactattccttgtgatacatataacattggtttatgtcaatgcgaaaaaaagaggttcaaaacatattgccatctgttaggatgtcgatatataatgctgtcgttatcattggatagcatctaagctcggtctttagtctcacagctagtacgaaaagctccagaactgtgaaatattctggcccctgtataacttcgaagagtaatctgagtattcgctgcgaaacggtgaaacagtctgtatgaattcaagtacacccaagaatggcacatatactcattatttccagatctccaaaatcgtgaaccttccgagatggcatttttatatttcaccgtagtactccgtagtgtagacactatgtcatgtttcacaaattatctgttagtctgagcttcgtgactcccgctaccaagtggatgcttcctgactttgagagatccgtcgaatacggccgagacggtggattatggcacggtcaacatagcgagagaacatgttccgactgcgactaaaattcatgtattattgccgatgggataatagtcttgatgcctctaagcctactctcctatctagtatagtttcgaataccttgagactatacaagatcaccaagagatgtcaacgaatacatatcggatgacataaaaaaaaaaccagtcccgctttttgggctgctaagctgggccgatatacaacctggggttctgggctcatgtcctggatccgaaaacgttgagacgtggagcattcaactctcacgattgaagtaagcacattcctctgggtcataattggctcttaggaagctcgagggatctgggagaaaagaaagaggaacctcatgaataatttcgagattgcctatccacaatccaccagctggatgccgatcacactatagccagcccctgtcgtatgagaaacaaaaaccagcatcgcatgatacatttgaaccctcttactaagtccaggtaactagttagtcaactagttagttagttagttggttaaatacctcattaatgtttgttcagtggctatattcagaggggtgaagtttagcctgctttgtcaggccgcataagagtagtccgagcgtttgctcgatactagccacaaaatgctatgggtctcttatttcgcatgtcgtgcgtcatattatctcaaaagagacatgtttcagatatccatagttttccaataaatcccgaatggcccagagacctcatgatcaacgccgacgaaattccgattattcctatgggcagttggagctgaaagaggccgaaccgaaccgaagctaagcgagtggagcttgaagcgaagtcaattcttttcctataggttatacaagtatgtgcaaggctacaaaaagcttactctgaatggtttcattggagagattggaagaattgaatggagcctgtgtactccgtacggagtacaaccagtagtaggaaggtggaagccgaaaatttttactgatctgactagtgtgctgcgcaaggctcagaaatctgttcaagtgtcgctgattggtatatacagcatcgtcggcccaattgtcgtgcagcggttccggtggtgcctggcggggcttcccttatgcggcgaacaccggttagacatcatctcctcgtgtccactgttggcggcgtgcaagtcttctctcgggggttctccgagcgtgactgggggtaaccggattaggcaatagcctcactccacatctgtacgggggaggtcaaagagcaagaggaagagtcagagtgagaggccgagcgaggggaaaaagtacgaggacaagctagtccagaccttaacttcggcttagttactggattggtctatgccctggaggggggtaatatggctccgacctatgaaccgagcctggaaatagttatgtcctttcgtttgtactccgtttacccccttaggtagctatatggctcatttactcacaccccttgctccttaccaggaacccgaacaacatcagttgaagcagccatgacttctttgtttccggccccactgggcgggaacaaccgttgacccgccttgaaccttggaaacggatatttctttcattgttgaagatagtatatagatgtagatgggagaaggagaaacacaatagtgctctgtagtacggagccagagtggggatgatgcaacatcgaaaaagcaaagtgacttcagggcgttccccatattttcacgctagatcacccgtatacattgcctgactcgttagtgccacataccgtcagcgagccattggctcaggtcgttggtcggccccgtcagatcaatggacttgcatggtcgatctttgagcaaaaaattgaaacgaactaaaaaattgatttgagctactcacataactagcccggccctagtgcatagacggactccatatgaaactccacgttcgaagcgaagacgctgtacggggtatcgggcaaccacacagtagggggtatgaaaatcatcctctctgccgtctcagctgatgcgtcaaaatggttaaatgctaaaaaaaagaaggacgacattggtccgttactaactccaaccgagtgtgtttccttgttagtctcccggcagatccacgggggccttgcgcagtctgtacttttggtgacctcgccacattccacccctttgggctgtgccaggttagtgagcaggatatgatggaaagggtaatcgacgcgaatagtaaaaggaagagaatagggtctgctaatagatcccctacagaacattagctctattctacagacggaatgacggccacggattccgatccttgtcaattccctgcagcggatgtccgtgctggtcgcacccagaagatctggcccactctttaccccagatttgttggcgtagcacagagggagtgagaaacgaaaatagaaggaaatttcaatgtggacggggatgagggatgctgcgacccgagtgatggaaactgtcgccgagaatagaagatctccatcggttttccggtcagcgcgcttctccttcctaaagagaaagggaaggaagggaaggtaaaagaagattcgacagtgtggcttgtacatcagatggttcgtcggaagtaatattaactcatttcttagagtacacatcattctacctgaatgttctacggattcttgtcttggcctaaccctaagtccccccacggatcaagggggaatgtcttatagaatttcatctggagtacatatggaactcgtgacgaatcacccacgttatttcgtaggaacatatgtaacatgtcctatatagcatggatgtaccccgtagactatgcaagacactctgtattatggatccgaggtcgatcccaaggcaacgagtgaaaaaaagaataaaagaaaaagaattaaaaagaattccagaattaaaatccccaaatgaaacgtaacactccatatgatgccctggtcaatttgctcggcttcttcactgcaaatcagggcatcagattcgacatgcttggcagcctccccgcatagcaaagtttataaaggaaataaatacggagtcactgctccgtacaggtgttggagagtcgaattggatattgattttctttaaataaatcacgcaaatgactggaatatacggagtactccgtcctccgtaatggattctgatttataggctaatgcgttcacagctagagactaatgtagcctgggtttccattacgcattagattcacccaagaataccctagcatgtatatattaatgtccttaatatccttctaactaagttactagtttcccctctttgctcagctcatacctggattgccatcgaaagtgtattctctgatcacacgcactgcggtggaccaagcacattttcccgtacgaatttcctccccctccatttatacccgacagcccctctcgtcagcgcgcatcggtgctcttatcggatgccctttcttctatccatgcatacctcattcttcacccaccaggatttgaatggctctgaggtgcaggagaaccaccgatcggatattcccatctcttcattaggcgttcgtggctccgtcatccgcggcagcacgtccagtgccagcaccgggattagcaccgacgatgcctcggtcgattcactggattggaatagcgaacactcgccggaacaagaccagccactgaaggggtattcgcagttcgatgcgcaattgaatgatattatggagttgcccaaggtggaagaagtggaagaacttggcgatgacttgttaaatatcaaacaggcggatgtggagtcgggcgctcccgctgttccacggaaacgtggtcgcccacgcaaacatccactgcctgctcccggaggccaggccaaggtcaccaaaggtcgctccaagacgggttgtataacctgtcggaggaggaagaagaagtgtgatgagacaaagccgtcgtgagttgtcgtgatccactggggtgtcttgtctaacaggggatagttgccaaaattgccagaagaatgcggtcgtctgcgaaggctacccgctcaaggagatctggaagagtgggagacagagagtcgctgatggtaggtgtagattacattttacattctaatcttgactgttcgcttgagacactaacttggttttttccccctgtagctcgatcccagtctctgacagccgtgccgcgcagtttaccccttctcatcgacggtatcgaaacggacgtcgaccgtcgctttttggaccattttgtgtacggcttcagtcgcgtcctgacgctcatcaacgatgattcaaatcccttcaaggagattctcctcccgatggcgacgcaacatagggggctgatgcattcgttgatgtgcttgtccggatcgcatctctcaggtttggatcccgaacccaagctgaaggagcggaaatactttcatttccaccgcgctattcaagatctgaaagataatatcaatgcgtcatcatcagcccagagccccaacgaggaggatcgattgttagtcgaggacccgatcatcgcatctaccatcgccctcagcttgaacacaatctgcgaaggtgaaaccaacggcgaataccgaccgcacatggatgccgcccggtatctgctgttgtcacagcagccacggaacgaaaaattccgccagttcatcgtcgagttcttccagtaccacgacgtctcaaactccctcacctcgcttgaccgccgtcctaatctcttgcaccccgaactgcacatgcccaacttcgtacccggcgtgtcagcggggatgttcctcggcgtattcgatggtctcttcaactacatctcggagatcacccagctccgcgaccgtatccgcgaacgcttcaacgagggctatgagccagccgtggactaccagacgttgagcgaagccgtttccatcgatatggccatccggaattgggagacctcgcacgagcccgataccccgaactggtgcctggcccaactataccgccagtccacctgggtatacctgtaccggacgatccggccctcgcgaccgagcgataaaatcgcgcaggtcgtcaacgacggactcgactatctggaccagctgccgcaagatgcatccgctttcagtatcgtgctgatgccgttgttcctgcttggttgttctgcgttcgtgcccgagcagcgccgacgcatcacgcagggcttcgagaatctcaaatcctattctaacctccgcaacatcgagcctgctttcaaggtcgtggtgcgggtttgggatattatggatacccggatgcaggatagttgggactgggaaaagatcatacgtgatatgaatatggatttcttgattacttgaatatccttttctcccctaccttcttactcttcttccccttacccttctgataccctgttatttcttatttctacgttatttatttatttgtttctcgttgattattacagtcttggaaggggattcttcgtttgtctcataccatggggacgatgatctcgatgttgtaccatgtggcgttttgatttgatcaccgtgagtgatggtgatgcatatctatatgcatctcggtcgggggatattactattatgtttgcatttgtggtttttttctttttcggcttgcgagcgttggtgcgccgcgaagtctccgtgtcaaaggcgtattctctggctgcattgcatggccgacatgggcgccaagccggctttcctcccgattcaaaaaagggccgagtcggtgttatttctgtggtggatgagtgatgtcgagtgggtgactgaatgatctcatgatggagggcgtttttgtgtctggaggaggcctggtctggccctgctatttgatttggtttagctgattgtgtatattcagatctcccttgggtttctcgcgtggcataataggaattgggtcttcatccttgtacagtatcggatttgtctttctttcagatgtattggggaggatcatccagtctagacctggccttgcatcttctactttaattctttgttcttcactggctgttccgggtacatcctgggctataatgcagtcagattaatgctcttacgtatattgcgggtatgaatacgagttaagacttctaaaggctttggcgtcacatttgtgtttttactcttcgtgaatattagttgaataccattaacatattcgagcgcaatatagtcaaggaggtacctataacagctcctcgcctacgtaaggaccacgttgcggggtgacagaccattgcagaccaatcgcattagaaatcggagactaagaatagtccggggtaggtccgaggcaaggagaattaattttctcagacttacatgactgtgcaggtgaattgcaagggtctgatgtcgaattagccgtcccaagagtcgttttttcttttttggcagaatccggggatcatcctgcagtcatcccataccccatccccatccttgtaactccagtccaccatctgcatagcacatccgaacagggtctcttgtgcggggggatggccgctacatgactcgtgcccaatcctgcgacaccggcaaaatacaccatggaaaaagaccagatcatcaccgaattgagcgcaaagcaactcggtctccctgcagatgtgcaagatactgcatacaatctctctctgcgtgcagtaaacccagtatgcatcaaagtccgcaacttatcgctcgaagtcaacaccaccccgccaatatgggagacctcgccatcacagatctggcagcgcttgcggggtcaggggcctccaagaaccagcaaaacagttctggacaatgtgtccgcctccatgccaagcggtagcctaaccgctataatcggaagcagtggctcgggcaagacctctctacttaacttaatggccaaccgaatgagtctctcccgagcaaacacatgcggaacgacgacttttaacgacaaccccaacatcgcgcacatccgcagcgcctacgtcatgcaggaggatgttctaattccgacgctaacagtccgcgagaccctgcgctactcagcagacctgcgcctcccaccaccaacaactccagctgagcgccacgcaatcgtggaacaggtcatcctggaactaggcctaaaagagtgtgccgacacccgcatcggcacgaccgcccacaagggctgtagtggcggcgagaaaagacgcaccagtatcggcgtgcagcttctagcgaatccctccgtgcttttctgcgatgagcccacaaccggtttggatgctaccagtgcgttccagattatcaggactctcaagcgtctcgctctggatgggaggacggtcgttgtctcaattcatgcgccgcgctctgagatttggagtctgtttgataatgttgttctattagccaggggagcggcggtttacagtggttcggtggaagagtccttggcgcactttgaggagtgtggacatgttcttccgccgttcgtcaacccggcggagtttttgatcgacctcgctgccattgataatcggacggaggagcttgaggctgcttcgaacctccgtgttgaacgactgagggatgtgtggcggttgaaacagactgcagcggatacagaggcagagggcaaaagaggagagcaaacaccgaatgccgagatcggtatatttgagactggagctgtgaagcaggtctcatttcgtcgacaattccgcgttctgacgtctcgcactttcaaaactaccattcgtgacccgatgggtgttgctggtagtcttcttgaagccgttggaatggctgttattaatggctggatcttcctgcagctcgacgaaagtcaggcagggattcgctcgcgcgagggcagtctatacaccgctagcagcttaaatggctatctcattctgctgtacgagacctaccggctgactattgatattcgtctgtttgaccgtgaacgaaacgagggcgtggttagtgtgccggctttccttctcagtcgacgagcagctcggttaccattggaggactttccagtgccgttgattttctctctcatcttctacttcatggtgggataccggttggatccgggacagttctttatcttcttcctcctcaccctgctcacgcactacattgccgtaacattcgctgcagtggccattggtgtagcacggagtttccctgcggctagtctggtggcaaacctatccttcacgttgcaatcctttgcgtgtggatactttgtccagtctaaccagatcccggtctacgtgagatggttgaaatggtgtgcgtatacattctacatctttggggctctgtgtgcaaacgagtttattggacccaatggctcggaactgggacagttctatgcctgtccatattccgataatcctctagaccctgcctgcaagcaatataccgggcgctatatcatggaaagtctaggaatgccgtcgcagtggatctggcggcctattgtggtattaatcgcgtttgccgtttgccactatatcttcgccggtctgttgctccaatataaccgcttcgcgatagatgttgcccaggcacgaagaaccgaaggagacccaactagtggaaaatccaagctcgctatacgcccaagagaggaggcgcgcaaagtggcaatatcgcttgacaagtacgcgttggatattcgaaagagacaatacccctgggaaactgcgaaaacactccagattctgagacctattaccgctgagtttcagtcaggcgagctgaacattatcatgggcccatctggaagtggcaaaacatcactgctcaactctatagcccacaggctgcacgggtccgtagggacacaataccgcgtccatggtaacatgctttacaacggcgcggtaccttcagaaagtgtgatccgctcggtgacatcctttgtaacgcaagacgacgacgcactgatgccctcattgaccgttcgagagagtctacgcttcgccgcaggtctacgcctcccaacctggatgtcacgcgaagaaaaagaccgacgcgcagaagagatcctctataaaatgggacttaaggaatgcgccgacaatctcatcggtagcgacctcatcaaaggaatcagcggcggcgaaaagcgacgcgtaacaattgcaatccaaatccttacagaccccaaagtcctcctcctcgacgaaccaacctccggcctcgatgccttcacagcaatgtccataatcgagctccttcacagcctcgccgccgaaggccgcaccctaatccttaccctccaccaatcccgctcagacctcttcacccacttctcccaagtcctcctcctagcccgcgggggctaccccgtctacgcaggtcccggaacacaaatgctcgcgcactttgccgagcagggccacgagtgtccacgcacaaccaacccagcagactttgtcctagatctcatcacggtcgatctccaacaagcagaccgtgaactcgtcacacgcgagcgtgtgcagggtctcatttcctgctggcagagtaaccctctcgagttaaggctagaccggcagacgtcgcagattgccacgcctgcggaactgggcagtctcaagcgccaaatgctgccattccgcgtgacatttcccctggtattgcatcgctccgtggtcaatttctggcgccagccgccgctggttatggcgcggtcgatgcagatcccagggatagcgattatcatggcgcttttctttgcgccgctgaagaatgattatgcggctgtgcaatcacgtatggggtttgttcaagagtttgcggcgttgtactttgttggtcagcttactctattgttccccggctctctctgctggatgtcgtttttgtataggcaggctaatatcctaaataggaatgctccaaaatatcgctatttaccccagcgaacgagatgtattctaccgcgaagaagcagacaactgctacacggcatcaacatttatcctcagctacaccgcgatcgaaatccccttcgagatagtctcatcactaatcttcggcgcgttagctgcctttgcagacaacctgcagcgcactgtcacgatgttcctcatcagcgcgttcaactgtttctgcataatcagctgtggcgagtccgtgggaataatgttctgcacgctgttctcgcacgttggcttcgccgtcaatgtgacgtctatcctgctctccatttcgacgatcctcggcggcgtcatgagtcttaatgtcaacaatgtgctgcaggcgctgaaccatctgtcgccgattaagtatgccattgctaatctggcaccgtattccatgcatggccaggtgtttcattgctccgatgcccagaggctcgctaacgggggctgtcctgttgattccggtgagcaggtgcttaagctctataatctggataagaatgggccgatgaatatcatggcgttgggtgtttgtacgatcatatatcgggctgttgcttatgcatttctcaaggctatgaggtcgcataggctcatggaacggtggagggagtggcgggctcagaggaagtctagatagatctggatctcctttttgggtggattttgtctgtttcatacttgagataccctttcacatgtggcttgctttcttttcaaatctatgcgctgcactcgactatatcttgataatgaaagtctgtagaagagaatcagaagatgataaacctatctcatcaacctggacacgtacacatgtctaagatggacatagcttgtattgtgtccctatgtgtaagcaaacttggaaagtgcgagagaaaaggaggagcaacataatactaaagactcaacagcgggtggcctagtggtaacatgcatgtgtaccacgagggaagtgccgaagatcttccactacctggactgttcctgttcgactctggtcgttctcgcctttatctcttttttttctatcctttttatgaagagagataaaccaaaagcctcaaatcacagttgttgcctgaggcattcaagctcatgtagtattgatagcactttcctttctgcctttcctttattcctaggtgcccttttcacaatacactggtaactctgatttatgggccggaatctacgaagaaatgttgcattttgtgttactttgcaaacagacaccccatctcgacaaacgaacccaacaaacgaaccgttccataaagtcaatacttcggttttatgccatgtatataaaccatggatggcctttccatcctattctagtagactttggatctaaaagactataatccagtttgatgttggcaacaatgaaacttgatccagatttacttgatgcctccaaatttgaggtctagacgccttggcttccaaccattacgccaaagccaaaaggccggcgataaaggaactctatgcgattaagtacctttgacaccaaacctagtttgcacaaagataactctaacttgtatgaagctgatactaccaaaggcatggtcacgtggtcatccatacccgccattgagcacgatgtgtacattgcacaacgcaaagagagtacattgactaatatggaaggttgacccggtgtcaactttgacctaccaagatgatgcctaatcaacggtgaagcctgtgactcacagttctacccgagagcacccggtacacccgactaggcaggcagcattgaatccctcgtgaaggccaaatacgaagtagacggttcaatgggaatggagttggcaggggttcacccccaccctgtaacagtggttctagactgcgcatccaagaatcaagccatgccgaggtgaaaaacggcaatcttggcatggggatggaatactaaacgggaaaagagttggagagattaagcataaccggagtccattggcggaaataagcttaataatcggaatcctccaactgccggttagtccccgttggttcccagagatttaaccgaacgttccacggttgacgacgggcggttcaaccggacaaccgatgtcgcccctcaacaggaacagtcctgacagatacggtccgctcaacgtgaatggataactcggcactttgagttatgtacctgccttgagagtttgtgtacctgcctgccatgagttcataccacgtgtacttgtactggattgtacatactacccacggagtacctatgacgaaagtaatataaagcacaccaaaaccgggataaatgacaacgctgtacaacttaaagcgttgttcgagagcgaaaagcgctgatctgagccaaattcatccgacttgattccttggaggaataatatccagcaaatcagatcgaggctccgtcggaaatctccaatcgaaaatctcaacgctacgtggccccgcagtggacacttttaaacgccatccgcccatccgactggcggtgggccctaagatgtggggccagatctacaaatgggcgatttgtgtgttggggttgtcaagggtccctgtctatcactggttctagaacgtgattaattattccttcgcactgagtatgtgttctgtatgtgatcatttggtggattcggggatcttaccggtttgagccttcgctcgtgctctacagcctttttcggggcttttttgcctcccagagaattcttcgtattttgaggattcctatgggttgttctttagggctggttttttcacgtctagtcagatagtttgaaaatgctaaattcgagtagatttctgaagtaaagatcgtatatttcgtgtgtaatcttcaagatctgatgatcatctatctattcacaagtccatctattttctcccccgccatatataactccctgtctatattcaaccattcccattcccattcattccaaggtgggggggtatttcggaaaaccgtaagaaatcatagctcgtgacgagacatcctgccccagcgggaatcaacctgctatagatggggagaagacatgtcgaatcaaccgaacatgttgcataacaaaaaaatcaccaatctcatcatctcaaaagggtatcaccacctggggtgatataaaagaaagaaaaaaatctgccatctagggctagatgtgggtgtgaaaggtatgtataaaagaaaggatgcacagttcaaccggcagaaacaaaagtaaaccagtggacaaatctaggactggccaatgaagagatccagagcagtgtcgatggggcagccgtgggtggcgtggtcatcagtgggctggaggtacgcagcggagcaagcggtgtcaccggccttgcaaatagccgtggggcaagtggaggtctcatcggaaggcacgacggagaagccttggtcggtgaacttgttgctgccggactgcatgtcaatgcaagacatgtcccagaagatggtatcgccagcctcggtgtactcgaactggaggacaccgatctgctctggctcgagggccaacttgatagagatgccaccgccgttggggttggtgcgccatgtctcggagtaggtgccaccgttgcccgagatggtctgcatgggaccgacgtcgccggccacggaccaggcgtagacgtcctgggacaggttgttggtgatcgtgacaccgccgccatcacggcggacgatgcccgagcggcggaccatctcctggggaagggccgaaacaatggtggagaagagagcggcaaggccgagggtcttggtgaacatcatcttgaaagataggaagatgtatatagactgatgtagaatggagtgatgtggtctggtcgacagacgtaaagaatgaaacgagagtcaatctcgagactgaagagaatgaataaaaaagagagaatgtactggtagtactttgatagtgaatgtgtttggaagaacagaaatccccgggtgaacgaaggggtttatatagcctctgaactgagagaggcatatagacccaggtacagttgaaagaaaacgtgcaaagccacccatacttcgagccatggatcggttcagggaattgtggggcgatccaaaggcaaaaggcgaaaaggcgaaaaaaataaaaagcagaaattcgagaaaaaaagaaagaaaaaacagaaaaaacagagaaaacacaaaaaagagtggaacgaaaatctcgcctcggcttctttcgagtttcgacagagagagcccagaccggtgagcgaagctttgtatacatccaaaagacatccaaattaagtgcgtacaatcagatgatatcagatatatactacatagttataacattattcgacttatcaactgcataaagtctgcattgctaccagttagggcatcaccgccacagtttatatacgaggtaggccatagtctggggcgtgtcgacatagggacttctgcgtgttcatacaacttaccactataaaattggcccactgatcgcctaaaagctacaactcacaacgtggcaatagtgcccacaaccccccaaaccccacacgtcatgggccgtctgaccgcatccgcggttctaacagatggaaagaattggtttgaaggctcgaaccagcaaaacccatggcaaagaacatggtagaagctcgactgcatggctacacagccacttatcgcacttttttcgccaggaacgactggggatttggagctcgttctgtggttgtggtggccactattacaacctttctatcccatttctcggatactagagaaataatcgtacattagaaaaaattcagaatctagaatgatagtctaaccaaattgaggcaaatatcagcaagcaatgagtgtcgatgagaacccagggtgcacactgtacggagtacttcaacatcataatgtggcaagtaggacattaccaagcagacaactatattgcccaatatacaacatacgcagtcttctaaagaatgtctgtcaaccgagccaatcataatatctcctatagattattaccacaattaccaattcgaccggcctggctccattctcgatgccaatgctcgataattcttatacaaactaaatcctactaggtaagtgggagctgactctccacagttcagaccctcttacaagaaaatcctacaacatataaactttatgtgttggagtatgtagtcctggacccctgtgtcaaagaatctaagccaatgatatctttatcaacaccccaccagacgcctctgacgttgatctagtgcccatacaaccgactgtgcctggcgatcgagtctggattcttttggcaaaagcatgttctacatcctacattgtacataatacggactactaactctatgataaagttttcactaaaaggttctgaattagggcttaagtttttgaattaatcaaatccgacctgagttaggcaatgggatgtatgaccatggcatttatcgccatgtgcatagagattatgacttgaagaactctcaataataaaagaaaactaatcctggtatacacaaaggatttctcccatctcccaattattctgtttgttttttttttccgaacttaaccctcgatcactgcccctgtaagccactatagtccgcatcggagttccccgtgggccctcccagtccgcgaggaacaagctggacccctacccccatcaaccccaccaattaacccccctccacttcccttgtttgcagcttacctgcagtctagatccgggaatcaaccggtaagaaacagtgcctggaatgaaaggagggatggaagatcccggatcaaatatctaccaatacggagcgcgcatggccgacagactagccaatgcgccctcgctgccatcctccttcttccggtgacctgccagctccaagttaatctggcgatggatatgcaccagccagtcaacgtagctctgagcctcgttattccggtcctccagcaggagtcgggcgaactcgtattctgctccgtccaggccttgccgggccagttggatcgttacggacttggatccgcgcaccgtcgacaaatactgcagcagattacgcacctgtgcgttcaagtgtgtctcgagcacaggcagggacgaagtgttggggttcaggccctggatggagtcgtggcccggcccgaataggtcttccagtaaattgggtgagacctgcgcgtgcagccaaaggatgactgcctgaccgttgtccacgatgtagacaccaccttcttcgatacgggagaagctggctcgcagggagggcgggatttggagctgtccctgctcgttcgcaaatccatcttccggctgcatgttgtgcacggggataatgcgagggtagaggtacaacgccatttccgtgcagcccattgaccggatcatgcgcatatcatgcacccgccggtctgatgactcggggccggccttgaatgctctcgatttgaccaagctgagcatgtacatcgagaactccttcagattctccggtagaactagctggccgggagggtgcgagccggagaagatcttgcggtatccgctgaaaatatcgactgtcttctctgagatattggctcggatgtccttgaggttcttgtccagggtcttcgaagcggctatgatggtatcagtatacacggtcaacattttctaatagatcgtccagcttaccctctttggcaataaccgagactacggcatcctggtcgacaaacttcatcgtctccaggcctccttcattcactgccgccacaacattgatacatcggacacggcgttgaccgtctgcggaagtgtaaagcaacgcggcctggaagtgcgcatctagcttgggatcaagtttaccgtcgtagctgaagagcacgccgacagccttgtcggcatcgacaccggcaatctccagatcagcgccgagtgtgtgctggacaaagtttccgtggtaggcggacacttgaagtccattggagcatcgaactttcatcagtgtttgatagcccgtctcacgagtgacggcatgagcgatttcatgtcggagcttgaggagatcgcgcggggcatggaaattagggtaaaagaaggtctcgcctccggtgagactagagacatgtcctatgcaccatattagttggctctttgtatagggctgaatgacgctttcaacataccaattgttgccacatcgaggtatgtgccaccaggggctgccacgaacaaatccatgcccacaccggcttcagccaacttgcttgccgtcttcttccaggctgggttttccgtggtgaaaagtttccgttccgcatccgttccataaactttaggatcttctctgatagccaagtgtcccgggccgtaggtaggtaagctagccaccgcgcagacgatcttgccacctgtagcctgcagtgcggagagcgccgagttcaatgtcggcagcaaagctgaatcggggtttttgatagaagagaaaattttgggtatccgactgagaagagaagtgatcacagacctaaatatcgttagtgatccgtaggagaccagaactataagatcgcatacttggactcatatgggtccacaaagagaccttcgctcagcggtacaaatggctcatccaaatcggtcatgaccatcatctgcgcttgatccaatgccgcctgcgaacgtgttaatagaagaagggtatcgcagagtgtggaacacatacggacaggttgtagaagtgcacctccttatcatacgtaacaaggccgacctttgccccaacaggtaattttcgtggtaattcctcgccttcggcgccctctgatgcttcattatcactaccgtacagagcatccttgatacctgcgcaaacacccttgaggaaacctcgatgaaccgactctctgctgacatcaattaagaagagggtttgaaggcccaccggctccttgttccagtattccttcgggaccgtaaactccacggttcccaccagtaattcaggacgttgcatgcgatccacacgtccaccggaagggtccagcggcgcaaagtattcgggaggcgtatcattcgggaacgtgcacatattacagacgaacttgctgccgccagatcggaaggacatgaatggattgatatatgttcggcatcgtcggcatcgtgggggaccaacatccccgaagtccagcacggggatcggttgttcgccgggatctagaggcgcgagaggctgcaagatcatacccaatggcaagccggtcgaggcaaggaagtcagaggcggaagggatgttattgagcgttaatcgagcgtatttaggagaggagttgccttggtcctgagccacgaacgggatcgctgctggtggggggaggtgttgatccattgtcgggtagacatggttgaaatagtaccgagcgggcaggtcgcgcgatcgcgggatgctaggaatatgctctgggtcaattcgccctgaagtaggcacagaacctgcaccactcgtcataccaggtatgtcggcgacagactgcccagatactaaccccaccgccggggaaactggtcgttcagcatattggttcaagcctgtgtttaggaactgcgattgttgttgttgctgctgtggctgctgcaagcctccttgatccatgccggtattaaattcttgcgcgggggttgctgcacccccgatgtcgtggtgagcatgacggtgcttcttccggtgtgtcctggcccccgtatctgctgcaattcctagcccgctcatctgggaggctaagcctgccataccaggatctcctgctgtccccattgcttgttgtggtgcattgtacgcaatgccgggactcgccaaattcggttgttgtggtgagccgtaggcgggccactgattcggcgctgggttggcgtaaggcgctcctggttgtggagacgcggtgctgggaggatacccagcttgatattgtgcagggggagcctgagccatgtactgcggattggaggggtcttcgccggatccctgacccattgtgttatacattgaagggtcggccatggtggatcatgccgcggaggtgtgaggtgagagaggtcacacaagggtgggattgagaaatggagagataatctcaacaaatcatcacgtatggaacagtattagagaataacgaataacaagagcttatgttgacgatataccgaatagaccacctaaactcactcggatttacgtacttccgaggatattcacgtggggccttatcgttgtactttgtgacttgtatttcctcttcctcttccttaaggtattatagaagacatcctcaaatgaaattgtcatcctttcttaataaaatctaactagtatgacccgctattcgtcactctgcataactccgtgttagcgaccagccggagaccatcccactctttgatggctccgaagccatacatatgtcaacatcgtctccagggctttgtcctcgtctcagcgccttaggcaaagcaattcatccttgtatggcttggccgtttttcgaggtccaatttacgcttatcatattctctccaatcacgtcagatctctaatcctggctccggctcaagctccttaggatacatctttttctggcgtgttcgactcaccgtacttttcccgtgcttgatggctcccctctagtccggtttcctgaaccgacgacccctgctctttacaccgtagatataatacaagacttctgtaagttccggcatttctcttttctttttcccaccttatctttgcccctcaagctccttgcatacatatatatgcattggtcgtatacctactccttatcatggacctgaccgcaaaaccagacccggatcgcaaacatcagacagaaggagtagatacaccagcccctcttcaacctacaatggctactattcacgatgatgatgagctgttgttggcccgcattggctataaacaggtattggcgcccaacacctggtggggatcatagcggggcacaatctgataacaattatcctgaactaggagttacgacgagagttctccaaatggtcgactgtctcatatgccatctctattcttggagtccttggctccgtgccggcgacattcggtgcgccgttgtcagctggcggtccagcaacagctgtatggtgttggttgatcggttcatgcatggctatgtgcattggaagctccgtggcagagttagtatcggcatatcccacagccggagggatgtactttgtcacaaagcaggtcgtgcctcccgatcaggtcccaattttctcctggatccagggctggtgtaacctccttggacagaccgcaggagtctccagtgtggcatacacggtcagtcaaatgttgctggcctgtgtcagtatgaattcggatcttgtagatggcaagtatttgtatgcaccgtaagtcaactagcccgaatcgctacgtttctaagctgatatattcaaggacggcgctggagaccgttctagtatcaatcgcagttctatgtattcttggggtgatttgttcgttgactacgaaatcactacatcgaattatcctatggtttgctcccataaacagtgtgtatcaagagaacttcgtcgtctgacttgtactaatgaattcacagttggggcgactatctgtatatgcattgcgctgcttactcttacccctaatttacagccagcctcttgggtcttcggtcatttcactgatggctcaggatggggctcaaaagtcttttcttttttcctgggctttttatctgttgcatggacaatgaccgactacgatggaacgacacagtatgcgactctgaaattctctattaattcatattctaacctttcatctttattatagtatgtctgaagagacccatgatgccgccgtgcgaggaccagttgctatccagacagccgtcttggtatccggggcactcgggtggctcctaaccgtctcaatgtgtttttgtttgaccgatttcgagggaattctaacctcccctaccggtcttcccgcagcccagatcttcctcaatgccggtgggaaacgaggtggcacagttatgtgggcatttgccattttggtccaattcttcacaggctgttcagctatgttagcagatacgagaatggcctatgcctttgcgcgagacgatgcgcttccattttcaaagtaggattttcttacctttgcacccgattgaaactccgcactgatacaatataggtacctttccaaggtcaatcctcggactcataccccggtcaatgcagtgtggttcgtggttttcttcagcgtaggcttgaactgcatcgctatcggctccacgcaaacggcaaccgcaatattcaacatcactgcccctgcactagacatctcttacgtgtctgtcattctcgcccaccagctctataaatcgaaggtcaaattcatcgagggcccttttacgctgggcagatggggtacttctattaactatattgctgttgtctgggtcttgttcatcagtacaattcttttcttcccgccacagcttcctgtgacacccgcaaatatgtaaggcgcttgaacccggtttatattcaggtatgaaaaggtatactaacatgactctacctaggaattacgccatctgtgttggcggctttattgccgcttttgctttgatatggtggtgggttgcggctcgagggtaagaaacatctaaaattaacttatacttccagcatcattcaggtggatactgacatggcctcctttatttctgcagaaagtacaatggtcctcaaactaatgatatcatacgagaaattcccaccgaggacgatggcgacgattccgaagagtcaggcgagatcactgtttagatgacatattcattccttacgcacaacgacaacttgcgagttcagttttctagattatggattagatatatattatgttcatgtttgtttgaagttttaggcattttagaaatgggtcatgttggtttcgggttaaattgtgtgtcgatgataatgttgtttttgaatataatactacctgtgacattgacttgagcaaaccagtagaagaaaacctgtttgattatgaatatcttgatttcggaagaaagaagtggctatgaatgctttgttgaccatgaagttatacaccggaaaaagatagaaatacatgtcacgtgtagtcttagctgcctgcaacaacagccaggccctcgtagattttccttttgacagcaaggaagctccctattccacgaccaccaggccgagctagtgaagactgtgccgttgcttcgatttcaatcttgcccgttccagatttgcgcacagctacggacttgtcaatgagaagcgttccctcgcctcggaactcggctgtgtgaccagcggattgcatcagcttgcgaagatcagccaatcgcaggtcaccgacatgaagagggcgagccatagacctggttcccgcggccatgctagctgggagagtgtcaagtaaaggatagacttctaccttctcgattattttggtgtctgcttgttccaatgtcggggcgacggcggaagaggctgcttcgtccttcagctgcttcaccttcttgcctgatgtttcggcttccccgatctcagcaggctctggccctctcaactgtgccatgagagcaacgacgccgaggctgcggacgtgttgccaattcaagcgtcgaacgagcgtgttgctcagcttgaccatccaggcatttgtatcaacacttgcatcgatgacttcgccgttcgcaggagtgaagataatggcagccgagtcaaacgcagggtcagaaaccgtggcgccgaccttgactgtcagcagtttctggcattcggctgccaatgctgacgtctcttctttcatgctaccaaccaggatcaatttttgaggttggatcagtggaattaacatctccaagctgcgcttgtcgtgcaagcccatgaagtcgatatatgcaatcctagcgttgatagtgatggtctgggtatggtaaacaaccttcgcaggaccttcgaaggactggccttctacttcgtcctcggactctgcagctacatcggcgtcttcgtcatcagaggcaaggctgagatcatcatcttcaatcttcttgccatcaatgtgaggacgcttccgtccttctgcaccgccagacaacttgcgtccattggggccggctgcatcatcccatcgtcgtttttggcccagcttagtctcggcgtcggtacgccgttgttgcatatcaatctcttcacgttcttcggctcggagatactcttctggacgaatgaattctccatattcgtctcccttctttcttgatgccacgtaaggaaacatgcgctcgcggcccttcttgccacgaacgtcgtaatcataaacgttctttcgacgaagaaggatgttgatgcccaagtcttcgtcactgacggcaagtttgcttcgagtagcgtgtgcaagtgaggccgaaaagttcagtgcgcgaccttgctgttcaggatccgagtcttcagaagaggtagagctcgatccgtcatctagagcatccgcagcagtttcgagagtttcttggccaagtgtttgagatgtgtcttcaagttggcgtttggtcgcgagatactgctggtatattagatgttccccggtatcgagaggggctcgctgcacatctgtccaagacaattctcgtccaccgctgtggacttgttcgatgtgttcgccgtctgatgctttttctagagccacaccatctcttcgctcctcgtaccactgccaaatcatacttccaatggttgccgaactctgtgatggtttcgattcttgagtcgtcatatccttgcggaaggactccgtcagcaataacagattgttgggtccttcggccacttgtcgaagcgcatcctttgagaagccccagtccattgatgtattggacgcaaggattaccttaggtccaggctctgccaggagcttctcaagacgcttcttgcgctcaatgatcttgagatgtttgaaagtgaatggcccaccccctttgttagagctcttgtcctgtccccccgtcctttgcccgttcgtgacgtctgtgctttccgccgcttcaaattcgcgaacaatgttctcgtccatccactccagcatgcttcgggcgagtcggattgtgttcgtaacctttttgccagccagatacaacccggccccttgaagaacatcctctttgtcgccattcgcggcatcgcgccaagaatgttctagtgcgtaagctagttcaagaacccgcgcacttgtgtctgtagggatgagaactgttccacctttcgcaaggcaacttcggatcatgtcgaggaggagatcgtctcgctttttccgacctcccgaaggtgccagcttatcgcctcctgttgtactacagatcaaggccgtgggtttacgtaactgttcaatgacttctgttccactggcaccagagccaccaaaccacgcagcacccgcgaccacactctcacgagcttggttccaatccattgcatagacaatggattccagcccatgctgaatatgccatatcgttccaccgacggtgtgaccggcattgtaggctgtgagagtgagcccgttcaacggcggggagaaaggcgatgggagaggttggtgcggttgggaatatttgagtggctgaatgagagagaagtatcgagatatatcctccgctgtcggcgattgaagaagtattcgacttgcgctgccagtggcctcggtgtctccgcctgacacagtcgcagatcctgctgacgatgcgcccggctctgagacagaagccttcggtaggaatgtggcagcgagcggagcggaggcatagaggtcttgtaggagggtacgaccgaaagcgatcacaggattcgttgcatagattgggatttgcgtgaagagggggaatgttcggcagcaatggactagagcgccaatgtgggcgggtgtggcgtgtgtcaagagaatgagagaaagcgtaggaatatgcctgattatggtattagcccatctgaattcaaaaaccttggaaggtaacccagatcgcatgctcacttctcaagttccgccaaatcaagggtattaaacttgtcatcccagccaacatccactaggattttgatgcctccatcgagctccaagatagactgttgtgcctttgaagatgacgactgggcgccaaggaggggagtgaacgtgaacatcttgagaatctgccgttactgacggcaaacctagcagcgcgattgttctggaccagggatgcggcgacagatcagtcacgatcaatgaggtaatgcctcgatgtatttggtcaattccaagattgatccattatcccatatcccagggtgtcaaatcgatccgactttcgcgaacaaagacaaaagagataccaggcgacgggcgagcttgtttgttcggtttgcacgtgacgtctagcaatataaagccgaactattgtataggtcaagtccttccctcgacacctttcaagggatttttttcaaacttacatttcacctagccgtggatagtttggtattgtatactggctcctggtgtttatccgagtttcgtgtaatcaagcgttgccttgcgattatgccatattctacaaccgggcttgaacatgcaactatgttggacaatatacatgcttcgctccagactagtatcgtaaaaatgtaatgctcaccagaagaatgatgaaggtcagataaaaatatgaaagaaactaataaatttgaaggaaagaggcataggcatcccaaactccgattctatataaatccgattaaaccacaacacccatagaaacaaacttcactaccaaactatggagagaaggtacacaacaggtttatctaaaggaagaccactgggctgaactgactgactgctctgctgcagatgctggtcttggcctccttttacctcgccctttgctccgtctttttgatctcaagagctttgtgcgcgccgcaggcgtaggaatttccccaatctaatagaatatggtcagcatggctcctcaaaaacctaatcaatggattagggcacttactggatcctgccattgaccgaaaggccggttcctttcagcccaagggggtagcgtagcatcgactttgggtttgatctcatggcccaccaattcctcccctgcccagactctggctcggcgaacagcaatagggtcagggaaatgcctcgccctccgcattgggtcattgaggtatattcttgtctgttctaggaacctatcttgcagattaggcggaatctcaggactaggtgcgtccacctgcggtcttgcacccgcctggtttcctatggttttcttcagtgccgccggcggcctgtctgatattttatctgctgcagctgctcgcatttcgtcccgtttgtcttgttctgctcgagcaaatgacatgactttatccaccgtgatctcagccgctgttttccttcgaaccgcggatggtgatggtattgatggtgactccatccgtattcgtttacttgattttggagcccctattatttcaagttctctttttctcgcctctttctgtgcgtcttccagtgagagctgtgctcggcgctttcgctttgacgcttcgcgatgtccaactccgcctagcctctcaacttgaacagaacattagcataattcactagggtgacagctaaacatattgactcacaatttttttgcttcttcctataataccgttcaatctgctcagggctgaaaagcccatcgtgggatactggggataggttattcgttgattgatcgctattatcgtcagcggtgttgaccttgctaggctcactggtcttggaagaagcgctgacctcgctgttagagccggacccagacaaggggctatcaggtgattgctctcgagagtctcgagctgagtgaggctcagtctgaacgtcatcgccgtcgccaaagattgaaccgtcttccgagattgtaactagagcctatcagtcagcgtattgtccgaataagtctgtagtatgcagcatgtaatgtcaaagtggttaatcctcttccccagaaacgcgacaaccagtcgtcttgggtatgactgcttctatgtatcgtgccccacagtgtagttgacactcgcacaccttccgaagggtctattgaaaaggcaaacgaacacgagaatgaaattcgagtcaaactaagcacatttgtactcaccacatgaaaccttttcatcatttcgaaaaggcgcaggggctgccggttccgaataagtaccctctggatcttgcgacttcctgggctcggctgtgtgactttcttcgctgccctgtttgccgccccgttcgctttccgggtccggactggcagagcgcgaggcagtcggccattcttccgatcttggtcgattgtagatattggacgccacggcatgcggatacggtcgcgccatgcgatcgtcacgcggtcggactgccatgcttggacgatcataattagggaagtaaaaggccgcattacttgactttcgactggattgctcggaggttcctgtcgcaaagtgccttgtgatgggcactggcggcagagctgggtcaatggccacagccttgagcaaagggccctgggctagggaatcatagatctgctctcggagctctgtgtgggtgagagtatattcgaggcacaggtacgcaagttcgtaaagagctgggtattctagcccggtccagttcttgaagtcaccttcttcaaaggtccactgcaattctccgaagtccctcgtaccaccagttctcccggaactggcttttgaggcatgtcgtttggaagggacttttatgtttgcgctgttttcgctttgaatgatcacccaacgaggctgtggtgcagcgcctccaatatagatgggtggtagaggtccccgatattcgtcctccacaccttctgggacatgaagtttctccatgtacgcccatttcccaatttttgaagctgggcgtttgaatgtgggccgaccgatttccacattaggaaccagagtcttgaccttgcgtcttttggcctgtggttcatagttgtcttcttcactttcttcgtcctcgtcttcgtgatattgttttgttgaagccttcacggtagctgcgctaacactgctctttgtagccttcgccttcttggcggttttggtggctttgatggccttggtcttcgcagcagttgtacgctttgtgccctttgtgccattcttggtcttggcaacctttgagattttcgctgcagccttctttgcatccttctcagccttcactgcagctttcttcgcgtcatttacagccttagctgcagccctctcggcctccttttcagccttcatcttggcgactttggcggttttgacagcttttgcggccttggaaggcttagctagtagcggctgagcctttggacgagtacccgcagtcgttgatcgtgttgcaaccataatttgagttgggtgatggtcttcaggtttgatttggtttgttagttggagaatgtaaattggtaacgtcgggacgatacctattgtttgttggtgttgttacgataatgatgattgatctgatgacaaaagatttgagtcaagaaaattgtggtcttgttggttaagggaaaatttggatatgttgactctatattaatagaagacagagacgagtcaccattcgtgccaatagacaaagcacgagcagggacgaagaaatctgcagctagttaccagcacaaagaaaaccaaaaatatattttcgagccctcttctttgttgactgcacccagcttgttatcaatacgccgatggccttgacaaagagcgcttcaggtcaatcctgatacgaagttccttttttgcaatcgaaagtaagtttaggtcagattattcagggttgataacagctgtattgcaacacctggacaggattataatttttatcactgttcgttgctgtgttcatttcgacacaaagtttcgagggactgtagaagaccaaaatcagttcgtgaggatggaatcaaaggaagtcaatagaacagaccataaacgtaacccagagaaaccgggcagttcgaaaaagaaaaaaaaagaaagagagaaagaaaccaagagtacttcgagggcgcatgagaaacaatgaacaaggaccgggatcatagcagtatcaaaaacaaaataaacacatcaaagagagcaattctcagaagatcagtcccagaaacaaaacacctcgtttcgggctcataatgggctgatctgatattgctgatcatctcgataaacttgcacccaccatgcttattccagagaggtccggatttttgtatttgaaatccaacgaagtaatatcgacatgtctcccgacaaactgggaaattcggaattgcgaagaggtgggcgagttagggcttgattccaagcggggatacccaaccagccacttccactaggaagcaaagctgaaaggcaagatcgaatctggttcatgtccagatttggcaatggcccgcctcatttcctatggtgaaaatgcctcttaaacaaagcgactcgtatttccccattgctgggcctgacaccagaacgatacaaagagatttgaggatgggtgagtccgtgcaagcatgaaggaaaagcgtaatcagcaacggcggatggaaaaaaattgcgcaggcgtgctagtctgctgtcattgacctatcctgtttcagattatctctgctcgtagccaaaactattattagcgaacgcctatcacgggacaaaggccatctcaaagatcctgtcatatacaccatctgagacaataccctaaatttcggtccctcggatcgtgcaatgtacgaacgagtatgtagaagaaggccgaggagcacgagctagaagtgaatactgctaaaataaaatcataaacagaaagtcctctcatcattcaagtacactaggtatattggcagccccaaagatagtgggatggctgccttgttcggtccttaattatgtcacgatatgggcagactcatcgaaagtaatcccttcaagcgaacttttgcgcaatgaagacccaggcagactgtctattgccagtacctgggttcatcgaaaacatggtagcggtgtccgcgaactccctcgccgcggaacaaggcagggaagcggcggccaacggggaccatctcctctgggatacgcatctcattttcgggttcgggctcgccgatgacgaactttccaacctagatcacgaaacagtcagaaactaagcacgcgtaggagaagaaataaagagagagcatcacttacctggatctccgtatccgtgatggtatcacgactaattctggcgtagccagtgcgatgcagcttcttgaaaagaaggtactcgcaccatctatcccagtcggtagggtcaatatccttcatttggctgcgctcgctcacataggtgttgtagttgccctcgagcggcttggtgacgaggtaacttaataggatcaggggacgtggggaatcacccatcaacttcgacagatactcgctctgcaagcggcggtcctcagggtcttcttcctgtccggagtggaacacaacaatatcaaccatctcgccgtacatgtcgagtgtggcgtggattgcaggtgccagctcacccacaggcgaggggagaaggtggtgcgtagagttgacaatggggaatttagacagcaaggcagagccccaggtgtgcttgtttggaccggggccgaagtcagtgtagtagccaaggtcctcagcgatgaactgagtaacgtccttgttgcccatgatgatacgctgattgtcggattcgaggaaaccaatgacatccagctcaagctcaccgatgacatcgcgcatgcgccgctcagcggaccacatgttgttgtcgaggccgaaatggacagtccagataccagcagtcacaaccttgtcttccttgtgataaggtgtgtagtcattggtcgggaagcggaggtaggcaatagacacggaaagcagttgcagcacagcaagaacgtagatatagtacgatcgctgtctcctgctattggggttgacaggcttgtgaggcttgcgggagcgagtagagttcgaggtcgccgcagagaaaacacccgcaccaatggacagcattgtagtggtcatgagccagtcagtgtgctcacgaaggaatggaccgcctggaacgaaggcataggcgacaacccaaacgtggaagagtaaaagaaccacataaacaaggaagccgatgccgaaagtgctcgcaggagagtgagcaacgctggatacaatcagaaccggggcaacggccatggtatagaacgcaagaatgagggcaccgtagaatccagtccagtggtggtagcaagtaagaagagcagcaccaatggaaccgacaccgtaggcagtccagcttccagcgattctgggatggaaaatgccgtacacaaggccagcccccattgcgaagatcgtcaaagcaccgtgaggagctgcgatcggtccgcgcactgggtatccgtcccagacccatgagatcatggtactggaatcagtcaaaagcgacacaatggtgaacatcagaccgccaaatccaacaccagcaagaatggacgagcccttcttgccacctgctggcaagtaatcaccgccgctcgtgtttgaacctctctgggacctcaaaaccgcgaacaaagcaatgaagattccaattttattccagccaccattctcggcgtgaacaattggccaaagggggttgttggtcttgcatgcaaacttggcaacgacagacaaaaccagaccgattccccaagccatgatacgggcctcgagacgaggagcgttgtgccgttcggaaaagaagctggcggtccatgctgcacacgtagtagaaagagcgaatccagtcacaaagaggcggttggcaggatcctggaacttatatccgagaagaccaacgagcgaaaccaggtgaagaaggcggaggttcttcacagctgcatatcgcaaagatgggatgacgtagaacaacggggatgcgcagcaaacaatggcaacctcgtaaccagagatacccatgtgccaaagagggaagtctatcaatatcagacaagtccatatagagaggaatatgtgtcacttacaccagacaaggacaggcagaccagtcacgatggtccagaaaacaaactacagtccattgtcagtaacacaaaagaccaatgatcgaccggtataatttaccccattgtagacatccgcggcggcatcaatgatctcggtccaaaagaatccctcgccaaaggtgttgcccaccggctttcccttcctacgtatgtggttaatttccgggatggttgtagttggttatgggattgtacacactctttctccaagacagaatctgcagtcgtttccaattgcctaatgaacacaaacttagacaatgtctttttttttcaaaaccaatatagcctttggcactatacatttgatgcgggcagtgtcattttggaagccacggtacataccctctgctaacacccttaacatccctcaccactagttcgaagcactcaaagtcaagagctgtgacagcatcaaaaccgacatcgaacaggattagggaccattcaaagaaggcatatttggtgtaggctaaaggtttgactgattagcatgcgataaaccccagctgaatgctcacgaagacaagtactcaccaccgggaaccttgtggaccttgtgctgaatgaaatagtaaatcagtggaaccaaagttccaaagaacaaactggccaagattttgcggtacttgacggcgcggcggttgttcgggctgagtgcaaggcaacccagggtccacggcaaggtggccaccaagtacgagatcatgaaaatgtcatgccagtcgtgatcatcggtagatgtaacataggtccaaccaccacatgtcaatgtccggaaaatgcccacgccggcaaccaacttaggtaaggtcgagttcgggcgcgaagtgaggatgtaccacaggaagacaagcgcgaagcgaggaccggaggtaatagcaatgaagacctggaaaaaggaccgctcgggataacggtcaccgatggtcgcagacacggaggggaaccattcaatagggtagccgtagtgttcattctggacgatcttgtggtagtgcaaagcaatgccgacaatcaacgcgctgatgaacgctgcatatgcgaaaaccgtgtgagtccatgcaacccatttgccgttgatctgcaaagatatcaagtcagtggcgtttctagatccgcatcagatggcgcttcagcacttacggcgaccacggcatctccgtccttgtatcggggagccatggcggcacagaggtaaaggcaatctctgcacctatatgattaaaaaaaaaaagctaaaattgagaaagaaaagagcgtcggaaaaagaacgaaaggaagaacggcttcaacaagatgccacgagcgaacggcccctgagagaaatcggatgaaaacaacgcccggatgcctcggtggttctgagcgtcgtttacgctaacccaatgcggctaagcgcaccctggggctgatcggtgttttttcaatgcgggatgccgactatttttttttaacatcttgagtgaacagcaatcatgtccgccgcaacagataaggctcgatttttcctcgagaagtcagtgcctgagctcaaggaatatgagcgcaagaagattttcaccaaggtaagcctgcgaggcggaattcttccattagaataacagctaatgataactaggatgaaatctcctcaatcgttagaaagcgatctgattttgaacacaagctcaacgcgcgcggggcgcagccagtggactttgtgcgctatgctgaatacgaaatgaacctcgatgtgctgcgaaagaagcgggtgaagcgacttggaattcggtcggcagggttcaacggccagcgacgcatcttcttcgttctcgaccgagctacacgcaagttccacggcgatatcaacctctgggtccagtatatcgaatatgctcgcaaacaaaaggcacacaagaagcttctcacgattttcaccgatgctctgcgactacaccctaccagcgccgacttatgggtttatgccgctaagcacgtcctcgatgaccacggagatatgacacaagctcggagttacatgcagcgcggtttacggttctgcaagagcgcgagggcaatttggattcaatatgcaaagctggaactgatttacatcgcaaagctggtcgctcgccaacggattctcggtcttgatgaggagagccagaagcccaaggccatccaagaagcagaaattgacgacactgatgccgacatgattgcgctcccatcactcacagccgaggacatcaacccgagcacaggagtggacggagaagtagaccaggttgcgctgcaaaacctgaactccacgcccgctctgagcggtgctatcccgctcgccatctttgataccgccacgaagcatttcgaccacgatgatcggttcggtcaggagttcttcgacatggcttgggaattcggggatgtgccttgtcttcgcaagattttggaacatgtgattgagacgatgcaggccaacaagccttccagcccacggacgcagatttgctacattaagttcccgaccgctggaatcccttccacttcggccgaattcccgcgggcgcttggtacttcgcttgcccgcctcagggagtatcccatgggcaaggatctcgcacaccaagtgatcaactggctccaacccgtccaggcaacaaaggatctggatccttcgttgcagaaggttattgcggttaccatccgcaatgcggagcgcgcggcacaggagtagtatacatatagcatacccaagtattgtacttagcacttaggcgttgatcggatattatcaaaattcagggtccatggcgaacttttccctttactaccatttgcatgatcattatcaatcatcgtatttgcttccccggcgactgcttttcttgtcgctgtgctgtttcttgtctttaatccgaccctcattttgagccctctgcctgtgttttccttttgtcagatgtgctcgatcgcttccatgaaaaaagtgcacgtacaatttttgcacgcgatttctttgctcttgggatgtttccccggggatcacctccttagccgagctctgcaatagctgatagagcttgtcaaagcaggattccacgttgctagactgtttccgctcctcgtccgactggataattagacattgggctctttcggcggcatatcgggaagtgcgtagtggacggtgtatcagacggggaaccaagggcagcaaggcgtccaatgggactttcaaggtggccttggagttgaccctatttccctcatctcccaattagcatcaatccagtactggtattgctgtacaagtggggacactgacttgttcacattttgcccgcccggcccgctggaccgactgaaagagagctcgcagatgttgcgggggatggtcttggaattgagggttttaagccaatccctggctagttgtacatcctgttcggcttgagatgcaaaccttctcaagggtagtgcccgaaggcagggtatacgccattggcaatacatgagagaggcagtccgtggccccggggagaggtggagtgtctacccttggaaaacgaacggctgtttctcgcctggtctagccccgcttagcgctttagcgtacgtaacaaaagcttttattttgactgggatgatgatttagattgattagagtaattggagtagttggagtggttggttggaatggatgatgtagtgatatgtatatgtgatgtagtatagctacattaaagtacatcccattcctatactccatacaaaattcctatggaatatcctccttcttatcagaatctaaatcaattaaaacaagatccattaacttgccctcgtgatactagaatagacatcccaaatacagaagcccaacgcctccggttgctcacctgacctacattttttttccatatttccacttcgcacctgtagaaaccccacctattccctattccttcttcatcgcctattttttctttctttctactcttcccctttcccttctgggtgaggtttgtgaaatacgacccatctttttcccatcgccccaccttagcttgcgattgcgaaaattcctaggaccctcttattcacccatctcgccccgacacttcctctccgtagatgaaaccaccactttctcgaagtctacatgacgcccagtccccccgatgaagcgcttcactttcgcggaaagactctgaccccggaaagccctcgacccctacacatcccagagccatccaatatcccagttttagagaaccaaatggaccccgtcttcaacgatacctccacctatgaacgctcggtgtataaacaggccccgcaaacacacgatggatggttgcacggaggatcaaaagatggtcaggggggaccgagtcagacccaaggtgctggtagttttcatggctcgcagccgaatcgtggggtgcagaatgaaatgattgcttctgcatactattctcctcccaacccagcgtccgggtcggaaaacaccggccatctgggctctggtctttctcctcccgattccacttattcccacactgctccggttgctccggtatcccaaggctttgccactgggagcgaagtagaccctgcccacaaaccggagcagtcaaggatgtcggaccgcctaattgctgaggagcgtgtgggacataaggcgggaggtgtcaatttccagcaactcctcgacaacctttctcgctccaaccctggtgcaactattcccgtcacttcttcggctgggcactcgtctctccaccaagcgcccgctggcgagtccctcaaatcccagggcatccccgcccaccctcaagcccaaagccacgattctgtccaggcccattatatgccaaatggcgaggtggcatatcaccaacttccgtctgcccatgatgctgctgccactgcatcgcctgcctactcagcccaacctagtaatacccaagcccaaacccagcctcagccgattgacacttcttcttctggaggtgcctcggtcaatctacctcctcctattgccactttcccgcaacccccatctacctgtgccgaacctcatggctccttgcaagagccttctgtagcctccaagaaaggccgtgctgaaaagcggtccatcaagcccgctgacgatgattcgccatggggtccagagattcaaaagaaatatgacgagttcctgcacgatgagcggatctatgtgacggaaggtctttgggatcggttccccgtgggctccaggctgtttgttggtcagtattgtttccgcttatgtctactcttcgtcgatctaacattctcatcatgtgcaggaaacctccctaccgaaagagtcaccaagcgagacatgttccatatcttccatgattacggcaaactagctcagatatcgatcaagcaggcgtacggcttcatacagtttctggaggcgagttcttgccatgaggctctcagcaacgaacagggagccgtcgtgcggggcaggaagatacgtgagttactggagccatagctcaacaattcttctctcaaggaaagacctaaccgttctcagatcttgaaatctcaaagcctcagcgatcgacgcggcccgctcaagcatccgaagattcccgtgcaccgccaccacgtcggtcccgatcaccggagttcaaccgtgcccctcctgggcgaactaacgcccgggcccccgtcgatcgatacgaccgatctaagccatatgaaacaaatcgggttccattcagcgatttccgggatgagccctctcaccgcagtcgacgtgacgattatcgcccgccgcgctcaccatcccctcgaccatttcgggggtctagagatgggtatcggtcgcgcgatagaactccagaaagatttgatcgccgcgagcgaaggcgctcccgctctccacgttcttctcgctctccttattccagagatcgacgttaccgcagcatcagcccccggccacgtgggatctatgaaggtgaggcggatttacccgtgcctcgacgagctcagcgagatgtaccagaggtgcagctcctcgtgctggaggaactcgataggttagttgaatcccttgatgtctgtttagacaaagtcgctgacattgcgaagaaacttcgttcttcatgtagagaacgctttccgcaaccgtggattacgagtcgatgtcctggtgcttggtccacggatccctcttggcgccgctgtgcatcgtcagtttattgaaggcgttcttgcggttgtccgcctctctcgtccgaatcaagtctctcgaaagattcctctgcaactatttgatcgaaccgctggattagataacgtccgcttccttggtaagcgcattctgtgttcgcctcttcatcgacgccttgctcatctttctttcccatatagattaccctgagcttgagcctaatatgtctgctgagctcctgagccaccaatcccaagcgatgcagcgaggagcagccccaaccgcatttgcacccaaccctggtttcattatccctccagcacagcccatgtcggttcctcaacctggcttgtctgcgctttcgaatccacccaacattgcgaacctcattagttcactggatggccctagtctttcaactctcttatcggcactccagcgacctccccattcgcaacctgtgtctgctactcagtcgcccttctcctcaccgaacccacctccggccgacctcgccagtctcctgaccaacgcacatcggccccaacccatgcaaactaccgcacagcaaccccttcctcacccacccttcaatctccaacctgtaaatgcacccgtcatcactgatccaaccttactctcgttcttggccaaaggactgggtggacaacagcagcagggccagggacccgtcggtgctcaggtacagaacctgatgcagcacctcgctaaatggaagcaatgatttcacgactctcttattgcctatcattctcattcgaacttaaggttcatcttgtcatcattttcggagcctggcgttcttgcaatccctacttggtggattttagtgctctgcttcggttccttttttttctggctggccgaaaaccagttcttgcagcactaggcgtttcctttgcttttcttttttgctctttgcttttctcatgtgtcacaaatgcagtaagatattaggtagatattagggcaaggcggtacctaggatggagttgatatgtctttttcaatcattggactcttgctcattgtgaatactggtttattcccccccttggacatgatacggatgtttcctgtatacttattttcggttatattattgctggatatctctccatttgacatcaaagcgtgtgctcaggcagaatgagtcaaacttcaatcctccaggtaatcttgtagataagttcacgagttatctacatatagtacgcaagttgagaatcttccgggggctctcaatgcagtctcaacaccaaagccctcccatattcctttatttgttgcggagcagaagacatacaatgcagtctcaacacttctgtttctctcgcgtctccttttacttggctatacagatagatcactgcagaattgtatgcgagctggtcttccgttaccagggaataaaaacccaacatgcaatatatagttacaagtatgtagtctaactcgactgctgccgtaaacagtgatgaaccctcgaccttaaagtatgggttatacggggtataggacggagcaagcaaagcaccccaagcttgcagcttctagcaatgtacctaggtcatcatggtacgtgataagagaggatatgctacatattgtacaaaggttaccgacaaagtccccctggcttcttatttcggattccaacctttctccttcaactccttcaccttagccgcatcctcattttgaatgcgctcgatcgtcttgtcccggttgaactccatcacacgcttttccttgaagtatttcacctagtagacgccaagaatcccgagtcagcaatctgccaatggatagatgtaatgtagagaaagctaggaaacaccaagaatggcagttatgagtagcaaatcaaagatcccatcatacgtacccagctctgtgaacatgccgcctcaaactccgcgacctcgttcgcgcacttctgtcgtgccttcttatcatctttaatagcgtctaggatatcgttcttgtcaaggcaggcgaaaaaatgatcacggccttcccagcagcgtgcgcgactcgttcggtctggggcaatgcggccgccgtcggaggctgcgttcttgtttgaatcaccggaagaccaaggtagccagaccattttggagaaatggttatgtcggagagggagcgggtgagaaattgagctgtcaagttcaaaatagtagagtcttctgtggtttgtagcgagtcaaggtgttggtgacggcagatgcccagatgttggcgggtcaggcctgtgaccgccaagactgttgatcccaagcaggcgatcttcatctccggaccctttctcacttacgcactccacgttctggagcttacatataattttgaggcctctagcactaaatacttatcgtccctggatctcacttggaacaccctcaccgcattgcatgttcccttcccttcgcctccaccgtcttacccgagcctcgagcctcgagcctcaagctcaatccgacctgacacatcgaccttgaaccaagttcgcgagggtgacaagagcccccagtttctatttagttgatgtccgcgcgccgacgtccgccagcggggtcacgcaccgaactccctccgctgaagattgtccgcaagatcctcttgctgcagctcgcttactatgcctgcgccacggtgctcatcctgttcacgacagttgtctatggcgccccattctctctagacctagtctttggctgggactctctgcgcggtgatacgacccttggatggatgttggggttggtgtggatgttgaattgctttattaggtgagttgtccgctgaattccacatcgtgagcagcatttcgatcagcagctaattataatctcctctcggggatgcttagcgtcatgttcctactcgttttcgtatcccgctcaaaattggtcccggatttcgccctgacgatccacttcctccacctcatcgccactactttatacacccactccctcccttcaaacctactctggtgggcgcttcaattcgccagtgcatccatgatgacgttccttggcatgtgggcatgccaaagacgggagctggagcctatcaagtttggtggacataatggcagcgcccaagctggctcgtcgccacaagcatctgccggcgatggtcagcaggagtcgagctttggccgcggccgcggccgagaacgtagcttgcaagaatatgaaatggatgatatgaagcacacgggtgagcatgctgtatgatttcgcattcgctcgccccctcgccccatcgttgatgttccccgttgggcgatgaacgactttttgttgccctgttatatcattttttttttctccttcttgcgcttcggtctatcgcggactctttgatgcattttttccattctgtatacccttgcggcagttgcatctgtatagatggcgtttgttctgagggaattgatttccatattcttttgttcgatacctgtttacattaatatctgctagctttgtattattcttctcagttggatagtctgacgggctatgcctatgaaaaactcgtgtacaatctctacttctcgaaagcgacattgtcttgaaatgctttgaaccgaatcggaaattgttatatattgctcacaccttacagtagaaaccttccgtttgtctcttcgataagcaaatcatactcaggctggaattcggtatagaagttgtgctaaaaattgtcagcgtacatattctcaggtgctttggcatatatgtctattccacttacgggattctgggcagcatcggcggtgaacttggccgcttcatccttgatgatcttctttggaagaccattggctgctgctgcttccgcaagaagctgtgactgacaagcattctctagcatagagtagaggatcgcggcttcatcaacagttcgaccgacagttaggaggctatacatgagtaaggttagatagaactagacgcatatagaaaatgcaatggcgaaaatcgactcacccatggttttgcaagatacatgcaatgttttccttgcccaaggcccttgcaatcgcctttccttcctctgccgacagaacaatgccgccatggtcttcgtaaacacccactctgccaaagaagttgcatgcgtcttcatccagcttgttagcacaaagccaaacccctaatacgactccaagtgtaaaaggaaaagccaccaaccttgtgtaagcatctcgattggctttccaaatgaactccacgtctttccatgaataccatgcgtgtgcgccgcagccacaacatctggacgtgctttgtggatctccgaatgaatcaggaatccagcttcattaacaggcagctgagctccaccgtcgacgacgaatccatcagcatccagaagaacgagatccgaagccttgatagtcgagaaatgtttggcgaacggattcatccagaaatggtccttgaggattgggtctgcaaggcgtcagaatattcttgctcccataaggtatatttcatttaaacaatgtgtctgtatcaaacctacctcgcatcgaaatgtgcccggagacaccctccccataccctagcttgccaaagtaccggaatgcagcagccatgtgctccttcatccacttgcgcttctcggtcagatctgaaaatgtgggaataccgcggagtttcagagtgccatttcggcctccacgagctaggccctggaacgatgcatcgtttgccgctggtggtagtgggggtagttggtcttcattggtcaagcgaacagactgcacttgctgtgttattgttgtagatgtcgacatgatgaaagattgtcttgatttaccgcactaactcggggactgggccttttaatgacgagagttcgaggtccggtactcgggctaacctccgagctcttatctatgggggaccccgctctgtcgttggaaggcgccggcagcaaattggaacagaggcttgtcaacattgaatgcgtctggattatttcggatttgaaatcaagtaaatattggctctagcggcgtatcatgccattgtgataagattatcagattggtcaaggtttcaaagttggttctctgcctctgaatccccgaatttgccagcattgtcaatatacaccggatttcaggccgcgcgaaatagcttcccctttcccttagtgcgcacccttggtcgctctttactcactgagtatgttgtagagctgagcacgcccctgtgtatcgtagccattaagctcgctgagcatcaccatcacctgatcattatataagccggatacttgcatacgcgactatcacatgacatttactatcctcagccgcaggacagcaaagtccactagacgtttggactcccgttaggactagatagtcgcttatcctccggttcttggtgtaatatagcttcgaagacgacataatcaagataagtgagagctccatgcttgaaccgatagcataggtaaattgttcatttgatgtatttcctttagacgatgcgtagatctacagagagctttaggaaatatgattatatatatatctcgaggcggtgctggcctctgggtgataggaaacaaagtcgatatttctgtttgtctagccttttatccagcctagagacgatattgcctggttttcctcggggcttctgaaccacttgcacgcacaatgaagtcgcagcctctgatggtgaccctctcaccactcttacgccctcgcattgcaacatccagcccattagccattgaaggcaaaccaccactggctggtcccaatgcatattttatctcccattggccatccgtccactcttctcttcgcgcgctcacctcctcgccagtgatttgaacaaccaattcgccaagggatgttcgcctaaccatgtggatctgcttctgataaagcaccaaataggagcccccaatttgtgctagaaacgatttggtaacttggtgctggccctcttccaggacaccctcatgagactccaagatccacgaaagaccacgccctggcccatctggccctttgcgaaacggaacatacctccacacctcttcataatccgtcatcaccgctccgggtacatctggtcgagccatggtcccagtctccaaaacatctccattgggtagcgggatgaatggacatgggttgctcacgttgaaattatggtgggagtcaatctcatgggtgaataccacgcgccctgtgttaagttagtcgtttattgtgtgatgcaccatggccaggaaatccgattgagatcatacgcgggtctttgctttcctgaacacattctcctgcgagggcccagtcgattttgccggttcgtttatcgactcgcagatcgacgtaccattcgccaaccattatcaccagtgtgtcggtggtttcgaagggtgtttctgatgcccatcgcattgagattcgtgtcattagaatcaattccaaagctgggacagatgaacttgacatttttgggatgattgctcaggatgcctactctgaagaacgggcgtgagaaaaattgacaggtcaaggatggtacagggtaatctgcatgattcagttggaaatataaatacttcaaaacaaatatgctaacatgtttccgatcaaagtgtttatcacaatctccaacttccaagaaatccgacgccacgctccccaaagtctcgctggcggttgccgttttcgcggactgagataaatgactcacttagttattcatcgaaggtcgaaaaactattcacacatttagtcattataaagatgataaagaaatccttaataaaaatgtgaaataccatcccgtcctgattctatcgccgcttggcaaagtgaaacgcaatgacttggattctgatcgctgctttcatagtagcctttcttgtctaccaactctcagtttccactttgtttagccctcttgcacgaattcccggtccaaagactttcgccttgaccaagttcaaattagcctatgaggactacaaaggaactcgcacgcgaaagatcaatgctctccatcaccagtatggacctgtcgttcgtatcggccccagtgaggtgaccttcaacagcacatcggccgtgcgtgcaatctacggcgctggaagtggttttgagcgaactggcttctaccacatgtttgaggtttacggtcgaaagaacatgttctcgttcgcgaccacgaagcagcatggagaaaggaagaagctctttgcccacgcctacgccaaatctgcgatgctcaaaggacagaatgcacaaatggtcgagcagaaagtcaaactgtatatggatctgttggaacgagatggggggaaaagcgagatcttttctaccttgcactatttctccctcgacacaatcaccgagtttctttacggatctttcggcaagactgcatgtctcgagggacagagacaagattgcgcactcattggagacatcatcgatattgcccgccgcaagctatcgtggtatgcagttcacttcccccacttcacggaatggctctactccaggaccggagttactggctgcattgcgaaacggttttacccgatgcagatgccaacgacgtacagcggtatcagacttcacgcgctgaaagccactcagaaatatgccagtgcttctgccagcgcgaaagcgagcacatcggccctgatatccagactgtggagccaccaccattcccaaaaaccaaatggactagatgatcttgatattgcatcggaatgtgccgaccatcttttggcaggcatcgacaccaccagcgacacactgatgtttctgatttgggctctttctcgaccagaaaacagacaattccaagacaaactcattgaggaagtctgcaatattcccgaagactcgctcgattcggatggcattcccaaagtcgaaaacagcgacaagctttcttacctcgatgcagttatcaaagagacactacgcctctacgcacctctccccggatcagagccacgctcacttcccacggcaaccataattgatggctacacgattccacctgggacggtggtttctatctccccatacgcgctccatcgtaaccctgacgttttcaagaaacccatgaaattcaatcccgaccgctggttggatccttgtgagaacttggcagaaatgaagaaatggttctgggcattctccagcggtggaaggatgtgtattggcatgcagtatgttctttgtttctgtggagtcgacttccagtcgtgaccatgaaagatgactaacgagaagcagtctggcaatggcagaaatgactactttggtcgcagccatataccgaaaatacagaaccacaccaatgggggattttgacactgtctcccctggtatcacaggtcgctatgaggtgttctacgatgatacttgtagtcgaatgcgggtatgtttagctaacatatttctctcgaagactcactaattgtggagacaggaacatgaatgtcagattgaattcacgccacattaagcaatttcgggatatttatgtggtcgtctaagtatgtagttgttgtgccatgtgttttgatttgaatgggctcgcatcatattggggcttcacagattagatgatgattgaaccctaaattttattatttgaaattaaaagaattacatactattttctcacagtttctaatctcaaattcgttttcttctgtgatattgcaactactactactagtactatctcaatatctccacctggccgatcttggcaagaaccccacgatgattgtggaaagagtcagcgagacagcatgtctcattgatcggatttgcaggatttgctgatctgttttatttggtcttaagatagcgctaaatttataaagagcaatggctgcccccaattctactcatgtacaacgttttgaatttgttgaacaatcttcaaaatgcgcttcactacttccacattatctcttcttttgcagggcgctattgctttgaatatcggcccagaatatagtcatccgatagaaggtcagtcacgcaagatgacccaaagatcaacttactaaacagacaatagatctcgacgtcgatcttccattctctcagccagtcacatttgcccacctagaatggcaaagatgtctcgcagcatctcacaataatgtatgcagccaaaacatttgtttaccaataattccacagagacctaaccttcgcaaaagcctcttgacatcgccattcttggcttcccctacgacacctcaacatcatatcgtcccggagcaagatttggtcctcgaggcatccgcgcaggatcggcgcgtgagaagaagggccgaagctataacaccgtgtgggaggtggatccatatgaagagggacttgaaattgtgagtgtagtgcattttaaatcgatgaagtttatgaaatgcaatgtcgggatcgctaatccatcattagattgactgtggtgatatacccatcaccccattcgatgccgcgcacgctttcaaacaaatggagcagggttacagacaggttctttaccacccgacgtccgaggaaaactcatgggaacatcctcggatcgtgagtctgggtggagaccactcgattgtcttgcctatcttgcgatcattgaaacatgtgtatggaccgatctccgttattcacttagattcgcacctcgacacttgggatccttatgagggttacactggaatcgcgtccaaccagtcggcaattacacatggaactttcttctggcatgcgagtcgggagggctgtattgccaaggggacgagtgtgcatggaggtctaagaacgaagctttttgtgagttgtgcgtggctcttgtcgggaatgaatactaatcggaattatcaacagagtcctaaggattacgagatcgaccgaaatgttggattcacgattatcgaggcccatgagattgacgatatcggcatgtccgggatcgttaaaaaggtccggagtgttgtcggggatactccgacttatctttccattgatattgacggtgagattgccctttcctctatctaagacacagcagatactaatcctcaactagtcctcgatccgagcattgcccctgcgacgggaactcctgaatcgggcggatggaccactcgtgaattgaagcgattcattaaaggccttgaaggtgtgaatctcgttggtgccgatgtggtggaagtcagcccaccatatgacaccgttgctgagactacttctattgctgctgcggacttgatcgttgatattctggcttccatgtcgaagttgaagacaggtcctaaggtgaaggcgccaagttcaagagatgagctgtgagcagagcttgacatatgtttcaaactttgagatttcaaccatgtatgaatcacgctatatgagactttgctttcagataggcaagaccaacttgcccgattgtttgagcgcatctctccagttaagcacattctcatctaaatccatgatgttccagatttcctgtatgactttccattgccttttgaaattgcccattgagtacctctggactcgctcccaccattcaacccaaggttgtcgatcgatcgcctcgcatgcagcgataaatgctggccaagacataggagctgcgcgttttccgtcacttgagtatacatctttaaggtcttctgccagcgaaaggttcttccaaattgcccctacttgctgctgaagatccaccgggctggagtcttcgattgctcgataataaaaaattgcgatcgcgctgtgaaatgatagagcctggcaacgtattatctcaagcatcgtcggctgctctagcatgacgtgatggaaagactcggagtctatatcccacgaaaagatttcatcctttaatgccgagcatgtctccagcaagattgttggcacttcagcaccctggtagaaggctaaatactcggccacctgacaggtcctttgtagaagattccccagatatggggtaatcccatacatgtattgaatgttggtgtcgtcgtcgtggaagtaaggctgctcaaataatggaccttctgttgtccattgtctatgctctagctcgtgtgctgtcgttcgagccaggaggcttaggaaatggcaaatactgctaacctgccgactggagtcattgagtgaatcggacgcacggcctggtctttccagctgacgacaacccttgagatgaattggaaaatctgaatcttctcccgtcattgtctgatttgttagatttaataagcttttttataacgtggagcgaaagctacctacatcgattgtgaccaaggccagcattgccgtgagatagactgtatatttctcggagtcattgggcgttatgagggcagtcttgagtgcttgtaaagctttggcccgatgctggagaccaagtttgtggtattctcgtgaaccacccatgatgttccggaggtggaatgcagccgatgataatatactgtggaatagtgaaatcgagacttctgaggaaggcaccggattttggacgagacagaactcagggcagccctcgagggcgaatgggagatatgttgtgcgccaagggttcctcggatggaaaactggttgtaggagctccgcgacatgatttttgtagtgatacataagcattgacgtattgtgatctttgaacagaggtattgaaagctccatgtctggtgatggatatattgtgagtgacatttttctcgagtatggtaatgttggagaattcgatgtatccatcatggctatcactgactcccagtctgaggggaaatctatgaaatggatttctgaattaggaatgacattgtcattcgtaattatttcaaaatctccgctggacaagtcaactgtgtccactggactaggagcgatctcagaagtacagtcctgagtctgatgactgttctccaaagaagcgtgaggttcgagatattcaatgccgccatgttcccggctggagaatattgaaaagggccctatactgactgtgcgcgatggtgttgagattgtgtcaagagaggatatcattcggttgatctcggcatccgaaatgctaggggaagtggattgttcttaattatgatatctatcagtgaatgtgcctttgaaacaaggccaagaagagggtcggaactcacctagtctgacctgcctgcgtcgtaggccttgaatatctcgcttcttatctgtaatccagcacagattcacaccgtagccggcgcattccaggcgggatttctggcaaactcgacacccattttcttgacgctcatcacatttgaccttccgagacctgcaggtccagcatctgttcatgtcagcttgaaaggtacgtggaagttcgaatatagttgaaacttgatgtattaccctgtgaatgtcaccgatttctgctttgcttggcgaatacgtttggtttgttttctaggagctgtcacggggccacccattgtatcggtctgactgtcaatatgagcaatgggagtcacctttcgatggtcgtaagggtatcagagagacccgcgttatggcacaacgtgcagttggatggtcaagaccacgcagttctcgatagtggagctagcttgagatacggggtcagtgaggaccaataattgcaggtaatagccgatgatgtgccccttgtgcaaagatatctgctctggaccccaagactgtggggttcaaatatcttgattccatgacataacatattttggggatgaactccgccttatcaggttggcaagccgaggtcttatcaattctttatcagtgtcttatcttatcaccctatcttggataggccttttgaaaagggaaggagccagcgagagcaagtaatcttagaccagttggacatgtagaatggacgtatttttagccacaccaggataatggcttttgcggcctctgccattagttgggttgatagtagttctttagatgtttctttttatagatatcttctcccttcttacggtggaagaaggcaagaaaaggcttaatttggtagacaacatttctatgtataatcttcgattgatatcattggctcaacccattgacagactggcacggaatgcttcagcctatctcagtgcaactccacctgcggtcctgtatagttcccttttccgtgcaatatccaccacagcgccactaataacgtcaatccacatgtgatcacactggtatagttcatatcttccggggatgttggcagggtataagggaagcagtaaatcacaaaagagacagcaatgtacatgcatgcgacagaattgacaacagggccaattttccccatccaaaatggaccagggcggatgttcttgcgtccagttatcaaatgtggaaatatcgcgaggaagtatgagactgtcgtcagcagcacaaacgaaccgataaaggccgagaaggcagtataggatcccacataaattgctccgatacatgtcagaaacactccgcatgccaaagttgcatacagtgggctatgccatttcgggcttatagccccgatatgtttggaaaatggcgtcgcgttatcgcgacccaggacataaaatgtccttcctgcggtaatatagcatccaatcgttgcaatgaagatgggtacgatcgtgagtgtaagaagccccactgcacctgctcgggaaccggttgcttgcaaatagatatcaccgagaggagagatagaatcggcgttcacaatgagggataggtcggtgacagcatagaatatggaaatcagatagcaaagaccagttgcgaagccgatggtcacttggcaagcaagtgctttggggatattccgtctcgcactagtcgaagtgtcagcgaaagaagcattaccatagaccgatattgcctactcaggaatctcttctgcaatgtgagtgacgcagtcaatggcgccgattgcaaatgccccgttcaacatgcctgcaaggaatgtgaatccgtcagagtaaccagtaatgttgttccagtctgtccagacgaattcattcgatgcatatcctgctccatccctgcttggcataatagcacaaactaagactgagatgacaaaaccgacaataatgaagaacgatccgatcctgctgatgaccgcgagagcccgttggcagaacatcacagtaagacaacatagccaggtgatgatcaaatagcaaacaaaaacatgccagcgctgcggttttacctctggatggtagagcgtgtatgaatagacaatcatgcttcctgtcatggaacagttccctgctacggcgaatgtccatgcgaggccattcaaccaccctgcaaaccagccgcacaacctgccataacgaggaccagcggttattgtagcccagtgataaacgcccccagatgccggaatagcagaagcgagctcggcaattgatgcggcaatgaagcaatagaaaaaggaggcagtggcgctatccttcgtgtaagcatcctaggaaaaacttccgtaaacgtgtggggacctacaactcgtatattactccaggtggtccaccattgtagagtgaggcaatctaagatgttttagtagtgcacaatttggagagagtatctggtgcttacaattccgcctcccaggaccgcccaagcattcccggtagtgattccagttgcgcaagcactcaggagattaaagctcttcgcaagtacaggcgtgacctgagtctcagtaacctcttttgtcgatccttggagggaagactcgagatcgccagggttttctttggtttcaaactgtgccatggcagtagacatgaattgcaacgcagtatgtaagattgtatatcactcacatctttcgatggaaattgctttggatatttatggcttttctttatctttacagttcccttagtccattacaagaaaggcttcgtcccttcaagatatgtgagaacaggtcgctggctcttacttgaaaaccaagatgcgattgaacccgacgatagtattggctaagagatacttttatcttttgtctcttttagatatattatatcgtatgtcgaatcaacctacggagtacaagctaatttctcttcgctagctcttgccatacgaattcatttctgataagacctatgatttcacagtactgcgtagtggcaacaagctgttatcgagaaaaatttcctatcactatcgcgacccccgtgttgagtggtaacgcatacccattctactcgctggctgttgccggatctggatatgctcgcgggcctgatatttccccaccggaccgacctattatacattatgactgcccggtgaagttcatatattccgacttcacaaatataaagcacgatccatccctcttacccttgggctcctatctaaaaaatctcagacttgcaatattccacaaacatggctcactccctgagtaaccaatctatcatcataacagggccctctgcaccatttgcagaggcttttcgtgcctgctatggcggtaagtttaattagaaatagagaattatatatcagctaacatctatcaaggtaccaagaacaagactgtcgcggtcaacctagatcatctaatatctagcaatttgaccgaagctcaggctcaggtaaacaccgctttcagcgctcttggggaccgaatggaggttcttattatcgatgccagaacgcagcagccatatgggctagactcgatttgggagattccgttgagtgaatgggatcagggacatacatccatgagctgtcggaggaaaatgctggtgcaggcaaagttgttccttcagcaccaattccaggtcagcaagttgaaggcccatgagaatgaaccagggagcggtttttctgttgtggtcctcggttatcaagatctcttcggtgtttcactcgatcaagttatttctaaactccagagagacgtctcacgacttcacccgggtgcttctttcaacttccttgatcttagcacctcaagagaggcctctgtcgcgtccatcgtcgcggcaacagcgacactggtctcagcgaaacccacctgtggaataatctcgctcagcgacattgcgagtgtaaaccccactgaaaagagcaaaagcgacaatttcgttgctgagaatacccagctttgccaaagtctccccttccatcataagcacccaaaggtcaaagttgctttgtcgtttgactttgacgcagtctctgccttcctggggacaggacaccatccagacaacaacttggcagactacagcacaggcatattcgccggtcgagtgggtgccaatcggctactgcgcatgttacaaaaacaccaagtagccgacaaagtcacttggttcatccccgggcacacgatggaaacctttgaagcaactgtcaaggagattgttaagtccggtgccgagataggacttcatggttattcccatgaaggtgcctaccaaatgacaccaagtcaagagcgagatgtgctagtgaagtgcatggaattggcccagcggctaaccggcaaaagagtgcaaggctatcgcgcgcccatgtaccagctgcgcgaaacaacaatcgagcttctgagggagtttgaatttctatatgactcctccctgagtcaccatgactcacagccatattttacacccagcgatccgccaattaaaccggtggatttctcccagccggccagtacgtggttgcgccccacgccactttctgagacgaatgcccgccccgtcggccacccacttgtggaaattccgaccggctggaataatgaagatatgatggcgttacagtacttcccgcatctcgacaataccaatgggcaggttgatgcacgggtggttgagcagagatggaaggacatgtttctgtggctgtgggagaatgcagacgttgatgggggcgatggaagctttgtcttccctatcttgatgcatcccgataccagtggcatgtcccatgtgatagggatggttgatcgttttgtagggtggctccggggatggggggacgcagttcagttttgcacttttgagagtatcacacggcagtggttggaagagcagcaaaaggccaaatgaaaccgtaggatattgatttatagaaaatgaatatgtttgtttgtctaggtgattagaggaggaatcagattactccgtatatctgtctttgatcgaggtatattggattcagttactgggtagatcattatatatctatagctgctttcacaccctagagactcctgggataagcaattataatctaagttcccaatatgtaagattgctctaactatatcgaacgaaggctagctctacgtctgttttaaaagagcttctacccttgagaatgtttattaggtataggttctcgcagaaaactctacattggcggaatctcatggcgaatctttaaatcacatcctttttgatacccagttagctcgtttggttcttcaagaaaacatcccttgtgtgctagcatatagcctccccaatttataagatctttcccgagcctatagtctgtcggtcttaatcttgactggacaaccgacgagggactggtaaatctttggactattacttcatagttgacaaaagacttatcagtcactactatggccttatgatcttcttgccaacattattcgagaaactcatggttctcaatcctcgacgtagatacttgccaggcccctatttagtcctttgacacgccattattcattgtcactggcaacttgtttccttccagactcgacccattcttgccaatggtctctaaaacctttcctgatcggtgaacgaggggtgcgcttcagcaaaacccacgggaaagagcctccgtgtgttgtcttgaagaaggagcccttgggataaaagcagtagcttccacctaagaatttcctcttgtcaacaatacacctctactgctcgcatcatttgtgctgccgctttcttctgcttcttctttttttttgataaagaaaacaagatctccccaatggcagatgcccagccgccgcggaagcctgtgttagtgttgatcaccactgccatacctttctttcctgcatccctcccaatcctcaatgcaatgatacttctaccatgaccatcatattccatatatagactgtcgggatacgtactaatatatgacagggcttctgccacgtttgcaacttccctgggcacacagaggagaattgcaaccgcctgagggcattggggtcactgaacagaatgtccctcttcccactccccgtaagacctatatacctgcttctggggaagtttatattgattcaagatgtgattgctacagaaaaagcgcaagtcgcaccgcatctttcgaggcgggaaggccaagaagggcatgtcatgttgtttccatgatatcttacccaaaattaactctcacctcactctcacttaatctctcgcttcatctcatctatttctcgctccattcttctttatgttgctgtctttcactgcttcattgctccgttgccctgttgctccgttgttccgtttctccgttgctgttgtgccgcacagaggaatggctaacgtatgaacagccaagactgctgcagagggtacgtgttcccaaacaattctacggaataagccaacaaaatgctgacgtaccttgtgtgtttagcagccgcctccaaagcagtgctccttcggcagccaccacaaccatcggtaagccaaatgccgctatactcgtgttttaccgtagaactaagtcctgtcttgatgtattgaagtgtgttgctactcttcgtttgttgctactctgcgtcgtgttgctgttttgattcctatttatttttcttgctacgccgaactgtcactgttatcgagtggttgtgctaacagttaattagtggccaccccctccaacaaggagaagaaacaggagtgagaagtcttgccggtcctttttggtttttagtttttcctttttgttacctgtctctgtttcttatgagtccgggctgtggcttaaatgcaatcaagaccggcgtgaccacttttaaccactcatctgccgtagagagtaaaaacacgtctcaaattcatgctcccatatcattggctttgatctgagctatcataaatttccatatgcctgcttaaaagcacgttatgcccaatttcgaactttctgaacaactttctttctgctaagccaggtatttcactctcttattctggattctgaccctatacactctacctatgtggctcagcctagttgagttgccgatatagtccgtgaactctaaatatacatagctagcaaccttaaaaatcccgtgggcttcgtctggatgttagctaatcagccaacttcacctgggcacctccaggctaggtaatcttagaagctctagagagggactaaggacctcaattttgaagcgtaactaggagaattcatcaactgtagggtagtggttcggatccatgattacacatgtacacgtatgcatacataggtaaaccttgggagaacgttcgcatgacacctacaccgtccaccattttctctttccacattttcctcatttttactccttcaaaacacctcaatatggccgagacacaagatcagcctcgtgcgttttcttgttcaacaagccagagatcttgagcctgacttgctttctcttgaagacttccagaggcttggagttcaagcattccaagtatccctggccccggaacatggcgaaggtcttcaatttgacccgtgcttctttcgaccacaccccgataaactgtgtgagaaatatccaatctacatttaccacttggaagatgatccacgggatatacaattcaccaccttaaatgattacatacaggatgccctaactgagcattcccctgaatacgctccgataattgcgagaatggaaaacgaggaggattttgatgttccaccagagcgtgatccatacatgcatgcccaggatgtagaggaggctattgagtctcacatcaaggctggaagatccggaccgcatgaatggttctcacttgtaaacttcagaaagaaagatcaagaacgttggaagtaagtagacagtcaaatattggattatagcatgggactaacaattcctagcccaaaccaaagagaagacgaccctcgtgtctacgagggatttgaagatccaaaaccgtggcgtgtggtcaatcattaccgatacatcagtcgtcctcttaagccgcattcaattatgttgtgtctcgctcaaatttggcctgatggaaatcagagcctcactacccacgagttgagagccatcgttaacatgatgcttcttcgagtgaatcacaaaccgtttcgcagatgccatatccatccagtaggtgatttcccatgttttacatgataatgtctaagaccaatatagattttggttctctcttatatgggtggtcatcacggcagaatcattcaggcttcgtatgatggaaagggactgattctataatattcgcatctatggagctttgcggatatcaaaacagcaccggtggaattgttcgtccgataccgtttaagcaagccagttggtgctattcgcacgttgtcccttgaatagctacatgtttaaatccctttattatgatagagcagttcatgaagcagttgctgaagtagtgtttggagcagttcttggagcagttgttgacgtgataaaagtgacttaattttgttagtggtttatatacaaattgtaggtatctaccgtcttgctagagagtaagctgaatcccggtgtgacagagtctagcgacgtaatctttgacacccgaataatataagtgttcgatatcttcaaaataatagatgctactacaaatacttatcgatatctatcaatcaatagtggaaattagattaagttgttgtggttgaaatataaaattgtactctatcgcataggtagctccctcggttgtggtggtggttccggggaatgtatcaggtgactaatcaatgtcacctgatccgttatcggccatgtgggcttcctatctccaggccaatatccctctctcctccaatgaccaagtcgtctgatgtcaaaacattgagagccgcattgaagacatattaattccaaactctacattcccctgactggctggattaaaagatcttctcaagttacttcattgctcttctcttctatgcagccccattgagatagacattggacttgtctagacccatcatggtggaaggagatccgtcatacatagactatgaggccttcttagacccagacttctccccatcttcattcgccaatacattggtgacaagcacaaacaatgcaacagataccccgttggatttatcaacaccattgtcacgggtgctcttcgatcttcaggagatcgacacacacatccatgcattgacaaccagatcagcactaccattgctttcacacacccaaagccaaacggctgccgctgataatatcttgaaagaatctgggacgcagattgcttctgtgactcaagggtacgagcgcctccaaaaggaggttgtacaaaaatgggaagcagctgacaaagctcgtgttgctgctgaaaactcgcttgaaactgttcgcctagcaagggcagtagcgcgctgcttaactctgggtagacagctggagagccaggtttctgaaattacaggccgagggccgaccccatcatcaggaccggatggagcaacatcacctggaaaagatggcttccgcgcactggagcgagcagcgtacacaattctgaatctgcgcgaaatgttctcagccacgacacagggcgatgaaggctatggtttagatcgggtgaaagccattcgcactctacgtggagaatttgtaattcccgcggagaacatggtcaagtcaagagcacaacaaaccatcagtcgattttctttgtcttccaactcggcaagcgccaatagccagtcatcaatgccatctggctataagcaagctcgtgatgcccgagcacgactggccaccgctgccataactctatatcttctttcgcctctaccaaaaggcgcaagcactgcagccgactacaagccagaactcttattgtcaacattacaagggttcatgcacacagcgatcatgacatccgtgaatgccctcgcccgggctctcacccagctcccaatcatgaaccaaacacttgccgacacctctgcacgatgccaagatatagttgccttggagagcattctcaaaaacatccgcccaccaccacaccctctcttggcgtccactgccacatccgacgaaccagctcccgagtcccaaacagcggcctcgaacaaatataatctcctgcagcctcttctccaggctctggacaccacatcacttccttcctactactggcgctccctcgcctcttctctcgcgccacgtgtccaggacatcgtcaaccgaggcggtgtttcttcccgtacattacgatccaaccgtgaccgactaagagtcgagatcaaagagtgtgtgctccgtgcgtcgcaggtgtctgctaccagcctgctggccgagaagggtcgaccaggaaccgacacggtagtggttggaaattgggagcgagaagctgccgtgatggtgagctccattgttggttctctgggacggtaatatgtggctactgcaagcatggtgtacatgttaccgactcaagattcggtaccagatagatgatgtcaatcgcatggattgactacagctttaatgagaaatatagttgtatggcattatctatctaaagtgggatattacacccgaatctgttgtgctctgatatttagatgtgaactagagatccggggttgattcttccgtctcatagaatgagaacagtcggcgaggatttggaataccacataaagcacttagtcactcgacaagagaaactagaggtcttgaacatgataggtatcagggccagcgatggtttctgaatatggaacacgttctgcagccattcttctgggaggacattgagactagcacaagtgctaatggctcttggtatatcgatgagtcgtctctgtgctttctaacatgaaggagagtcatcagtaggctcttcatgttcgtcgacgacgatgtacatgatatcagtgtggatttgaagaattgtcttgctactgttggtcattataggaaggtcggcgatgaatgacgtaacgataataagaaaatacaaactaatagccaagctaagggaggcgttcgtaccttcccagagggacaggacgttccacggaaccgatcgcgtggcgacggataacaattgcatggtatgttttcggtgtttcggcgtatcctcggcatccatgtcgccgtgctcttgccagacaacaattgtcgttgtgtgggtcaatgttgccacgggtgcggattgtctttttgaagatcttccgggtcctctacagtacgtcccgaaactggtgcaaccactatactcttcgattgacttccctgccccttatgccaagatgcactagtctacatttggagttcttctggtagttgcgtgtgtatttcaccgtacgtatgttacatagtaatttcgggcatgtatttgattgaaatttcaatatatccgatacctctatgcccctcctccgaggcagctttccttgggaggcgcacttaacaatctatcacaagtggtctaaccaaatatagctcaaaccctagccccttccgagcatgagcttatctatgatatgattcacagtggcgaactatctataactaagatggcacaggccgctagttataataagagtactatctcgagaatctcttctaatataagaatgtttagtagcgttaaggtacctctaaataaggaccgtgcattgatcttatatggtacgaaaacgaatccaggattccccaaaaggttgttttcaagttcaacgccttaaacaagcctttaagaatgcaaatggcctaggatgaactcaacattctcaagagtctaccgccacatcctaatataataccattcgatcgcgttgttcttaaagaccaggagtcccgggtgattgggttcacaacgaagtacatccctggaggaactctcgccaattcaaagatcccttttcgattcgagtggctacaacagcttactcaagtcgtggattttctcaacctagaactagggatcatgcaccaagatatcgctccccgaaatctgctgatcgatccttgcacacataagatcgtcctcttcgacttcgaccgggctgcatccgggaaaaaacggctatatgaaggtcgagatgatgttactagtgtcgtcttcacactctacgagcttgtcacgaacgatacatccttctcgggtatcatccactcggatcgacatataggcatggtgcaaagtatctcggaatggattgttaatcgcgaacttgactctgacgtatcgaggtttcgtaacttcttgagcgaatgggtagcaacacgaagatctgacggggatatggaaaggtatctcaatgcaccacaccgatttacatggccggacctaccaacagcgcccgactacaatgtaccattcgagatgggcacaacctgggatggaaagccaaactagatgactggccatcggtctagattcaccgcaatgaagatggggcagtactgctttcgctgggagaggccaccacagagccgctcgttgatcgaggctgagaatagtgtatagtggatcagaatactagactgcgaaatgaaggaatccatatttataatactttcaaatgattggtgtactcctgatgcatgttgagtagtccaaataacacaggattacctttattccgaggctagtctatatacaacctaatacgtctggcattaggggtagaaaacgaatataagagtaacaggtgctaaaaataatttccggacgccgctatcagctggtctttccttttgtctattcagcacgcatgagagcattttaacggtagcatcacgggtgaaaataaacagcctgccaggcgggattaagggagatctggattcgccatagaattgtatattctcgcacatgtcagtgaccgatggctcacttggttattttaaccgattgtaagatggtggggctctttcttctgttagacagcatcacgctttctattttcgggaatttgcgccattctgcagcgtctcaggctatggatgctgctacagtggatagcgagaacatcttcctccccaacgactgtctttctgttctcggggcccacccactcccaaggccttagcgtgaatcctctaactagacctcactaagtcgagggccactataaaatactctttacctagtctatggccatcaatttttaccgcccaacattcaaagaacggcatataatataacagggagagatataataccatacacaattcattatacagcggcccctaacttagtatggcctaatgagagatcgacgctaaagccttacccaagaacagaaaggcagttattaggaaggaagcagatttcgctagtaactataggctgttctctaatcaaagcacataatatatctagactagatgaatattttcgttgctagtcacttctttgcgtcgttttacctaaaggccgatgttataaacgaaccaccgggcggcacctactttcacgccgtgcttaacaaagaaacctgggtcttaatccttataaatctgtataaggtcgagacaattttcgagggtcacatcgtgtgctttgttgatgttctccctgaaagtctcgttgctcacccgcgattgctgccattcagtatattcgtctacagcgacatccagcaggccgtcaaccatgattgattcagtacagccgggcccggtgagtatggcgtcattagtaggagggtgtatcgattgctgagatgatcctgctgggaggatagtgatattgattggaggacacatggaacccattgtagagttctccgcagctttctttttcttatccagtcgctggttctcctcggcatagagctgctcgcgaacactgtcagggacaccagcgtaggtctcaagaaccccaccttgctccacatatttgacgagggccttcagatggtgtgtcttcaatctatagtgcctttttccctctggatcttgccagcagtattgtccttcgtggcgacatggcggcccgggacatcgcatgacacgatacacatcgcgccagagcgggagggaagtgacaggtcgccagattgtcgaggcactcctcagctctattgtttgccttttggcatttccatggaaaattctagttcccttggatcgccaatacagttacgagacgaggcaccgtattttaataatagtaaatcacggtatcgagactggtacaggaatattgatattcctgggctattcccattacgttctagtgtctcttggcggtggggctagagaatcacctgaagagtgtaggcggttgcaccagtttcgggacgtactgtacgcaaatgatgattcgactttgactttagcatattggccgatccctgcgttacagttgccacttataaggtgttcaccacagtagttgccccatgcctttgagaggtgttttggtgcctaggggcacatctaggatgtgtcagaagagactgatgtacaggaggtggtaagctttggggaaatggaaaggagtgaagatagtgtgatgaggggaaggataaaaatggggatgtaggagaatatattgtaggaaaagagtgagtctgagccgaagatcagaagagaaagagaaaggaacataattggggaaaaggcggaagaccccattctcctgtcattgcgtagatatggatatgcttatttgagcctcaaacgtttgaatgtgaacggtcttcggaaacaaactaatagaagctctcactatacacttgactccacgtaaacaaagcatcaatgccacattttcagactttacttttccactggcaatagttgctacataacgatcatctccttctatactcaatcctagaatgatgccagctctctcgtgtcttaactattagattctaccataactgtaaatacctgaacgttgacgtcgcaccatgggcgacagacccttggaagtaacaagcacctcggcacataagagcaaccaaccaggcgcgaagccaagacgcgaacaattagcgtacctgactaggagcaaaaaaaccgctaggtacattcggacaaccatcttagtaccaggttattgggaccagatcgtcagatcgtcagatcgtcagctcgtacagaacccaaagcaaaaacctccgagcatcggaaataatccccatacaatgtacatatgtactctgtatatacacattaaatatgatttgccgcagataagcgagtaatatacatctgcaagtgcgttgtacaagtacccgagcgctggatgttctagagtcagatgactcccacgcagtgtaccactaggcagttctgaaatggctgaaagctggtaactatgtgtactgcatgttgactcaatgccctagatgcagaggggacagatgcatgtcagttgctaggaggtgagggtggttggtccaattagcttgtgggaatggcatgggtatggattaaagaggtaagtgcgctttgtccgtcccgtccggtctgaaattcacatgtgagttgaactttcagcctcctgttagtacttattgtatgtactatgtgtgtattgattgatgtctaggggtggtaaggttgattgatgttttagatgatatgttagtatctatcttactactccgcagatgctgctatcatatgagacgagactatattatagtaatatttttttaatccatataaggcggctcctacgtggcccccaggtacgcatcccgataagatcaggtacagtttacatggatggacctggtatgggatgcatggcctgtgattggactgattagtaaatgatcgatgaccagtcagattagacggctggaaaggcaaacggatcaccccaggggcaataaaacaggtggcagcatgcggagtccaaagtactgccacataataaaatcccgatctctggaaggcgtggaagatgtggaagtttcagccgtagccctggagatctcacaagtcaaagacgtcagcatatgtatccactgacccggatgggccccggcactataatcaggtttatcgataagccctgcggcttggtacctggctctacttggccgtgcgcctccctgccaaccctgcagatgtacctacaggtacccgggtctaggatttccccctcttctcgtacatccctaggtaggctatttgtagcgacgatctatccatgcgttctgagaccccggtatatccataggggcagacaccatatgtgcgttgcatgttttatttctccgtacttcacatgggacttttcccgtggctttcccgtgggagataacgtcaactaaactgtcgatcatttagactagcggcaggagccccatcctcacctatttcacttatagcacctgctgacatccccgaatcatattccacaaactataatacgtaatgtaccgtccttgctcaagggaaccatgtctctagggaagaggagtgtatatcgcctcttttccacccgccaatcgtgttcgctggatcataaccgaacttccatggggccgatctggggccaatgcggtaccgtacatgagtcagaacttttagatctacaatacgaagtatacccaagggaataagcacatcatccagatcggccgtggcatcagatctcgatctatttcccaggatatttgatcccaaggctaaataaagccaggcgaatagagtacattaaggtacatgagaaccaaggaatcaaggatctaaggatgttgtacaacattaacttccaagcctgggaattgccgtttgcagactcgagggaagtggggggaaagtttagtagcgacgcaggcacgatgggccaacgggcttagtcccagggggtgaaagtttcagatggggagttgcctgaatgcggtttcaacggagctgccggatcccccaggtgacgagctcttttttattattattttggtcttggttctagggcatttccggagaaataagtacatatcgaaagcgggatgttctagaatgtatagaatgtatagaatgcatattatagaatgtgtacaatatggaaatgagatctatctcttatcaacaccccccgcagtctacatgtataaatctaaaattatcatgggctcggaccaatgtgagatcctccatagaagggctcgagcaaaggatactgtatgaaaacttcgtatcgggaccattcggaactctttcccctaccgcgtaaccatctttctggtaagagtatgacgaggtgcgatacatccacgcgatgtaagggggattggggtggtggatgtggttgagaggaggggaatggggagtatatcgaggttaaccctaaaaactccaccaagagtctcgacctttttttttctccccaagaaccaaacttgtcgatgcttggcagtgtctatttccagggtctggaaaagatggttaacgtcaaggaccagtcctcgagggtttaacgtccctctataatagactcctatatcgaccgggggggggcaggattaggtctagacttggatctccaggtcaatcgagtccacgtagctccaggtagctccagatccaagtagtccaagtccctaatgaatcatggaggtgcctggtgccttttggataaaatggagacacgcggatatctggtgaaacacctaatgattcgcatcggtagccccggaaggtctttgagttcctgttcgagttcctgtctctttgctctctgctcttttctttttttgcccctcgcttcctgataagcctcttcttctctcatcgtcaccattttttgttttcttttctataacctccctcgatagtatatatatcctgcatatatactgcaccttggtctttttctctcttctttttcttttacccggctggtcggttctctttttcgtttttctttttttctctcttggaaatatttcagagatgatcgcgatcagctaataaccttcccttttctcttatttcttacattcttgaccttctccccgcccttgcgtttgggatcctagtacacattctatttccgcccctctttctcttctttctctctcagagtaagcgcactttcaaatcgtacgtgttggaactgatccgagtctcttcgggtctctcgtttttttccctctctttttttgtccactcgagtagtgtccaggttactgagtttgcgcaaatgttcacagtcaatccggccagactccgcgtcttgattcaccccgacttctccgtagcgctgcggtttttccgactcggtatagtgacatatagaacttcaactggttttggggtgattattccgatcggattgtcggctttgcgatcactggtggtcaggaacattcgcagttggctctccgaagacctgacatcactcccgcctcccaccctcttacgtcgctatggcttcctttctccctgtcaacaactcggcccctgaagaccacgcgatggacggagcagctacacctcgtgcgatcacaaatagcgtgccggtcacaccggacgtttcttcgacggagcagttcccggacggagtttcacaccgcagccgcggtagcgacacttcatcccgcacaaccttaacccacgctcgaacaccgtcaacgtctgacgaaccaatgcacgattccgagggagaacaggatgattccgatcatgatcaaaatccggggagtaacggacccccctcgaaaaagaagaaaggacaacggtttttctgcacctctttccctccttgcaatctgagcttcacccggagcgaacatttggcccgccatattcgaaaacacaccggtgaacgtcccttccagtgccactgctctcggcggttttcccgactcgacaacctccgccagcacgctcaaacggtccatgtcaatgaggaaatccccggagattcgctagcggccacgggcacacggttccagcgtcaggtccggacagatcgagtgcggccaccaggccgggcgcgggcaggcacagcgggcagtattggtggtcatacccggggtcatagcaggaacttgtcaagttcgagtattgcatccaccgcttcgacattcagccaacctccggaacttcggcggcgcccccctcctttgatcatggccaacgaccccgcagctcgatcccgactggcgatggattcgatgggagaacctccgagcacacccccaggccaaatccgtggcgttcctggtccctcgacagctggatcaccgtacaccccctccaatatgtttgctgttactgggggaagtccccaatttgcgtcgcccatgtctggcacagcccacgggttctgggaaggcaagacggccgcccgtcgtctttcagtcccaacgagcagcaaccctttccttggacagcatggcaatgcgtatcccccggcataccacacacccgccggcgcaccttatccgaacgccgctggcgtatttgcaagtcctactagcacgcattactctgcatctcgtgatgagggcaccttgagcgcggctgaggcggagatgcggagaagaacgtggcacccttcttcctacacagggtttccacgtcctgcgactagtggcctgaaccaataccatacgcccgacaatgtcccggcctcattcggcgtgaacggttcgagcgagcatccgccccgactccccggaattgaaagtttcgacaaagtagttcaacggccgataacccctcccactcggaaaaccagcccaatgcagctggatggccaccatcgtccacctaatcacggttttggatctggattcaattacacacagccagcccaccgtccaccgccccccatctccggccccggtcaccgacgaggccatgtatcctgggatatgtctttgcatcataacttaaccggactggatatccgagaccgacgtccatccactgcgtccgctactcaatggagtcaacagacgctcgcggaactccaaaatgtctcttcccggccatcgtcatcttaccagcctgcattcggcccaatggctgagagaagccctgaagagtatcggggacatcgcccaagcctttcaactgggagccgcacgcgaacttcccccgaggattccagtagcagtgagggtgtccataccccatccaccgcatcgcttgaatatcatcccgcgattgtgcacagcagcggatatatcgaatctcatgattcctcactgccttccgatcaccctccaccggtaggaactccttttcgagcggacggctatcgccccggttactaacgccgacatagatatgtggccgccagtcctcccacgcggacggctacgaatcccataacgaccgggagcctaggcccgacgtcttctcggactctcctgcccgacactcgggcatgggtcgcctagaggctcttgtggccgttgccacaagtgagaacaaaggagcagccaagctatttctgtaaattgtctggacacagccctcctattctataccatactacaccattctacatatgaaagtcatcgtcgcttcctgcaactagctggagagcgatcatcattatgtatacttggcatttcccttcccgtctatctcgaactcccaaccactctttccgctccctctacttccaacattcagcccaatggcctttctaggctcttccgattctttcttgtttctctatatatttcggggattctcatacatgcttatgagaagcccttgatgaactgacgactttgacgacgactgatacacgaccgggaaacatagcccatctttcttttacttgtgttcgggagtcttatgtttgtgtttatgatctcttttttttcggacggttctggagggcaatctttttttcagaagttcttggtcctgagctgcatgtcctggcgttcgcatgggaagttttgtatggatggagtcgtgtgcatcatttggttaccctttcatttttggtgtctgcgctgtggctgagtgttgttgcatttcactctctttctacgcggactcttcatctctcccatctctcccatctcgagcccctcccattctctatctccttatctcgccttctcgttttcgttttgtgtcttactatattctttttggggcggatcgtgcctgatgctctaacggactacaattatgaaggtttttgacatcggttacgaactaaatatgactgcaatgcatatgcctttctcctgatcacatgtgcaaatatatttttcgacaaatgtaaaatatcatgcaaacatagaccaatgggcttgcgaacggagcattcaggagcccgagtaaggatgtggagtacaagatcgacccgaaccacctattactagtatagcatactatggatcatccgtacataggcccagaagttttgctctgcgacaatagccagccatatgtggatagtaggaagaatcccagaaccggatagcaatgaggcagcgatgacttgcaggtgacgtcgacgggaagtttagctttccggggctgggccttccaaggttgagttcgtccccacttgtaaccctgcgcgcttctatgaacgccgttggaaacgttattgtagacattcaagagggattggggattggaattattactgaaacaagatccaattgccaatggatatatcaattgcaaaacagcatctgggaaggagaaaaaggaaggagagaagaggagaataagagaaaatacaaggcagaggcaagggtctagcacgaggactgggaacaagacgtcatagtcgattctgtgttaagaactacctataaaaccagggatactccgatccgttagccacagtatctacttcaattacacgctttactccgtacatcttctactcccaacactacactacagcatcatgtcgaagaaccgggttcccatgtatctgggcctcgctgcggcgggtgcaggcggatactacttgtactctgccggcggcgatccttcagcagcaaagcaccaaatgaagagtaagtgttctgtctgataaattcctcggttaatattgaactgcctcggaacattaagctgactctctctctcgctatagttgacgctgagaaggcacgcgagaagctcccaagtacaaataacgccgagaagactggcaaggatttcggcaaggaagccggtgccaatatcgacgatgctgtaagccatgtcctgtccttggtgctatacctgcactgcagataatgtgtcatataatactaaccatccaaatttagatcgccaaagcccgcgctgagggcaaacgtatcccagagttcgcccaggagagcaaagataagcttgatgagctccgcgacgaagcaaagaacaagttcaatgccaatcgggagaagctcaacagcggtgttgatcagattgatcgtgaggtcgagcaaaaagccgctgaagccaaggggaccgtctctggctggctaggtggaaagaaataagctcctttcgcccttgagcgacaattttatgtcattattttatcacgacgctggtcgtttcgccaatatcacgaagaattccatgtctatgcaacatatgcttgtttgatgtcgatgtagtttggagatcgtgtatgccatgttttcaacgcacctggtctgcccagggcgcaacatgaaattgaatgtagctgttcaattatttcccgatagtaaagactgatttggaatttattctctgccatacattagcatcagatatcccacgcgttcggagaaatgtagaggcgctgagcttggacacagtgacattccaatgccggagtactattaccgtagtgacgagaatgccttggccatggagctgatatctttcatacacaatattttcaggaattcattatattaagactttctctcttccttttgaaacgagtcttatattccatgcttgaattgaagattttatagttcgcgctcacgcgtttctatttagcctaaaccggctagcgtgtattttcaacgcgccctcgaacgcgtctcccctttgtaccttctcggacatctcctcccacttcccactttccacttgtacactttccaacttcttgctcgctctaatatctcggtatctcttaccttgtctattataatacacttgtatccatcgcccttgcttcatttattcttcctcgacaggcaaaaatttttcaaagcagtcgcgatgccgcgcacttcccggtcaagctgcgttgcccagccagccattcaagccttcgctcggacaaccaaagccggcatcactccgcaactgcctgcaaagaagatagcatcccttccggtctcgccttccaaaaaacgcaaactgcaggaactcgaaaacttcgacaatggaagcagacaggcaccaattgaggaggaaggcacgccctcgaaaactttgcgactcaatgaattatccgtttcctcaccacgcagcggccattatgtctcgcccaagaaggcctcgcctgcgaagaccccaagtcggaccccgagtcgacgggctgcccctgtcaagaacgtgtcctcgacacccgcgaccccttcaaagcaacgaaccctgaactttgagaaggttattcctgtgaaggcggaacccctagcgattgagcggcccgcatttttcaacgacattctcaaccttcactcctcatttgtgcaagctttctccattcacatggcacacaatggcgcaaatacccctgcggacctccgagaatttcttcccagcgtgacccgcctgtggaataagcgcaaggtacagatcaaagacttgcagcgtcttgtgtgggtctgggagcagagttcgaaagcgaaacacatttcatatcgcctggcaaattatggactcggtaaaatatgcatggagcgtaccgtgcaggccaacgtgcagcccccagctttgcaagactctttcgaagaaaccttggacttgttgtgggaaaaggccccggaggcccttcgggatgccaatgaggaggaccaagctactttgttcatcgagtctctcggtctttctacaatccacgaatccctcaccccttttacggttttccagaaaggccagcaacgactccaggatctaaagggcggtctgctccgtttgaaggccgagagaatgcgctcagagtcagcagagacgactcccctggagcggacggcaacaataagccgccgccagagcctgctagatcgcattaagaacaaggagctacgccagtccaagcttccccctccgcctcccaagaacgagctcctacgacgtgcagccgccgatcgggcggaggagatagctgggattctggccatgttgcgtcccgttgggtatgtgggcaatggtatcaaagccatgcttgcagcccaacgtaaacccttcaaactcgacgtgatggtcgagcatgtccgtgactcagtccgcaacgagattcctcgtgaggaggtagagatgtgtcttgagattctgtcggatgcaaaggtggctggtgactggatcagtgtggttactgttggccagatgaagtcggtcgtgttgaagtcttgcaaggatgtatctgccaaagacattggggcgagagccgcccagctgaaggctgactgggagaagtctgcatcttgtgtgcagactcctttcttgtgatttatgatttttctttttggtgtgttcttttgtctttcattgttggatacctcgcatccgcggagctggtctgctcgcggtcttgcatcagcgctcgataccctgtactttaccatatgtctcttagcatgaaactaccttaggtagtactttagcaactaggtcctcggacgcccaatcataatcccactaccacaagaaaagtcaaccctcgccatgtctaatgtttgttaattttttttccccttgttacttacatgtacaactagctagcaagacgaaaacgatgtaaatagcataaactttctacgtacggattaaccaccaaaattacccacttaacgcgcgacgcgtgcacggaccacacgaattcaagcgcgtcgaattggactcgtccaaactaccctgataccagcatttgcgttgtcctttgctgcatttctttttacatcaaccgacaccatgtcttcccgacctgacttgaaggtatggattgagctatctaatattctccaaacccaccaatacagcattcactaactcaaaccctgaatcgacgcaggtcgacgacgaagttggctttattggcttctaccgtggcctccctgcacccgataataatgaaacaatccgcgtatttgaccgaggcgactggtattctgcacacggcgccgatgccgaattcatcgcacgcaccgtctacaaaacaacctccgtgctgcgcaacctaggccgcagcgaaacaggcggccttccctcggtcacaatgagcgtcacagtcttccgaaacttcctccgcgaagctctcttccgactaaacaagcgcgttgagattttcgcctccgccggctcgggcaagagcaactggaagctggcgaagcaagccagtcctggcaacctgcaagacgtggaagaagagctcggtagcgtgggcgcgctgtcaatggactctgcgcctattattctcgccgtgaagatctccgctcgggcagcggaggcccggaatgtcggcgtgtgctttgctgatgcgagcgtgcgcgagctgggcgtgagtgaattcctcgataacgatatctactccaatttcgagtctttggtcatccagctcggtgtgaaagagtgtcttgtgaccatggatacggctcgcaaggacgtcgagctggcgaagatccgggctatcgcagatagttgtggtattgcgatctccgagaggcctgctgccgatttcggtgttaaggatatcgagcaggatcttacgagattgttgagggatgagcgttctgccggtacactgcctcagacggagctgaaactagctatgggatctgcgtcggcgctgatcaagtaccttaatgtcttgactgatcctacgaacttcggccagtaccaactctaccagcatgatctgtcgcagtatatgaagcttgatgcctcggcgctgcgggcgctgaatcttatgcctggtccgcgggacggggctaagactatgagcttgttcggtttgctgaatcactgcaagacgcccgtggggagtcgcttgttagcccaatggttgaagcagcctctgatggatctgggtgcgattgagcaacggcagcagttggtggaggcatttgttgttaacactgaactgcgtcagactatgcaggaggaacatttgcgttccattccggatctttaccggttggctaaacgcttccagcggaagcaggctaacttggaagatgttgtccgagcataccaggttgccattcgtctgcctggattcgtaagcgcgctgagtgatgtgatagacgagcagtaccagacccctctagagacggaatacacctctaagctccgtggttattccgacagcttggccatgctggaggagatggttgaaacaacagtggatcttgctgctctggaaaatcatgaattcattatcaagcccgagttcgatgacagcttgcgagtcatcaggaagaagctggataagctacgacacgacatgaatatggaacaccaccgagtttccaaggatttgcatcaagacatggagaaaaagctcttcatggaaaatcaccgtgtgcacggttggtgcttccgtctcactcgaaatgaggcgggctgtattcgcaataagaaagagtaccaagagtgttcgacccagaagaacggcgtatactttaccacgtccaacatgcagtcccttcgccgagagcatgatcaactgtcctcgaactacaaccgaactcagactggtctggttaacgaggtcgtcaatgttgccgcttcgtattgcccggtgttggagcaagtcgctggtgtactcgcacacctagatgtcatcgtgagctttgcccatgcttcgatgcatgcaccttcgggatacgttcgcccaaagatgcacccccggggaactggaaacaccgttctgaaggaagctcgtcatccttgtatggagatgcaggacgatatctccttcattacgaatgatgtttccttgattcgtgatgaatcgtctttcctcatcatcaccggtcccaacatgggcggcaaatctacatacatccgacagattggtgtgattgcacttatggcacagatcggctgcttcgtcccttgtacagaggccgagctgaccattttcgactgcattcttgctcgagttggtgcgagcgactcgcagctcaagggtgtatcgacgttcatggcggaaatgcttgaaacgtccaacatcctcaagtctgccacctcggagtccctgattatcatcgacgaacttggccgtggaactagcacatacgacggcttcggcttggcctgggctatttcggaacatattgtcaccgagatccggtgctttggcctgttcgcaactcatttccacgagctcactgccttggcagaccgttatcctaaagccgtcaagaacctgcatgtcgtggcattcattggaaacggcaatgaaggcgagagtgaagctgaaaccgaagagaagaaaaagcgccaagtcactcttctctaccgcgtggagccaggaatctgtgaccagtcctttggtattcatgtggccgagctcgtgcgcttcccggataaggttgtcaacatggctcgtcagaaggctgaggagcttgaagatttcacttctgcgacaactgaaaatgggcaggcacaacttcctgcgccctcgcttgacaaatactcgcaggaagaggtggaggagggcaacacgctcctcaaggaaatgctgctgaaatggaaggcggcaactgagggcaaagagatgacggcggagcagaagcgacaggtcatgcgtgatctggctcaggccgatgaaaaattacaagcaaatcaggtgttccaaagtatcaaggctctatgaggatgtgagctattcatgggatttggcgttgatggaaggaatgggtttgaaaggcattgttgtatactcatcttttacatgttaagataacctagcattctactttatactctaatctcttctagattcttcttatagttctcttataaagtagccaaaaggttgtaacgacggagtacggagtatactccgttaatatagaggccagtcacgtgtaggtcggtctagatgatcaacgcgggattgtgacgaagccactttattacaaaatccaaatgatcgttctttttattgtctccaattcgttcatttgaggtttcaactttcaacaaaccctttaagcctggacttgtgctgtcgctgtgtctctaaaccaccctcgatcgatcgcctcatccagctatgcgcgcaacctcaacgcggacgtcctgaaccatttcgattcatgcaccccttttccgttctcactcttgggatcttcgtcgcgggctatattaccgctaggtgggaccttgttacccgtctatacgaattggccatcttcgcctgggatcacggtgtcgtggtatgtcttccatcggccatcggtcctttgctccgcttgcgactttatcggcttggtgccagcgcacgttatattttcaatgtcgctaatttgctatttagacacgaactgcgaaggggtttttgtttctctccgtcttctttttcctcctcgtcctgccgatcaaccatctcgcgtctaaagagggccaattggtgagccagaactaccacagctgtgggcagcgatcgaaagataaagcgcttgatgctggcttatgaggatttgctaacaggagatatatagcatccgcgccacgtgaatctcggcgtctccgcgcgcgaacaattgcgtcgtcgaggttcattctgagaaaggtggaggatgacaatatgctcatgggtgatggactgttgcgggtattttggccatacgacctcccacgatcctcgtccccgggcgtgattgtcggatggcgaaactcggagcttgatttgtttgtgctcacggtgctggaagatgtcgaggtaggtggttgcaattgccttgtctgctcgttcgatataagctgatcatgctcgggatgaatagtctaaaaatgttgacaatgctctacgggcggggattctctttcgaaacagccctcaccctattgtgcgcatcttcactctatgtggacgctctcaaatgcatgtcctcggctcgaccaactctcgcgagcctccgacttctttcaacccttcccacctggatgtgactacaatattgtccccgaaagctcctcgcatcttctgcccaccagaggcaaacctgtctgtccaggtcatcatgtaccaccgcccgcacccaacacgcatggaatatatgtcgctcgatccgatttcactagccttgggcgataaagcgacgaagacagaaatatgggggccatcgtcagatacgatcgaatcagaggaagagggtgacaaggttgggcccaagttgttggttgagaagctcaagcttcatacggtcgtcaagcacattccatcacagaaggagcaagccctcccgctcattatcaaccaagtcaattgtgcgtatgagatggggcagctcatgcacagaaatagccatttgattggaattcgggcgaagagaagtatgagcgtcggagaacgtgtcgtggaatcggcgacaactttatgggggtttattgtcctttgcattgcacatgttttctggcaatggctttggcccgtcgtcacccgcatcttcgtgatcgggcttgtatgccaccggtctgttgcggaaattgtcttgcgggttcttgagtggcgtgctcggcctgatgccgctgctctcaaggatatctcagcaacagcccagcaggttgatataagattgcagcagttctgctactggccgattcaatatgtcaagcttcggcaaaggaaggataactgggagagtgtcacgaccagtcatccagactatattcggttctataacagtctgtggcttgttgccaatgatgtgatcatcgggattgcgttggggtcctacattattgacaacgcgaactgggttgcttcgcaaatcaacactgttttgaccggctggacggtggaggggttacagcgcactatctcgtggctaatggattggccagccggcttgaaactcaacaacgagctggcggcgttcctcggtgacttgtttctatgggtcattgagaactgggcagcttgcattgccaaccttcagccttacctccctgctgtcatctacattgttggatgttcaagttttgcaggagctagcatgccaatcgctcttttctccgaccttctttcgatcctgacggtccacatttactctttctacattgcctctgcccgtatatttaactggcaactcaccattatcatttcccttttccatcttttccgtggaaagaaacgcaacgtcctccgcaacagaattgactcatgtgactacgacctcgaccaactcctccttggcactatcctcttcaccgtcctgttcttcttactgcctacagttgtggtgttctaccttacctttgcctcggcccgtatgttaattatttcaatgaaggcagcgcttgacacctgcctcgcgttcttgaaccatttcccgctcttcgcgttgatgctccgcgtgaaagactcgcgacggctaccaggaggtatccgatttgagcttcggaatgaaccagacaagaacacagcagacagggacttgtctgcgctggtttcttacatccacctcgaggtatgttacatatccaaccaaaacatcgcctcagaaaagctgacatattttttagtctattcccctccccctacgtgcaatgttcgaccaatacttccagctgggccaccggctccggaaacactacctcgcacctcgcgtcatcttctgccttataaccggccgatttgtgccacctatccatcgccgcaacctctatagcatgcagtacagcatgctacctgcccgtcgtgctggtatggtagaggtgtggacattgctcacacagccgaagaaaggcagtggtggcagcagtggctctggatctatgggtgcaggcattggatccttgagtaacccaatagcgaaagttccagcaaatttcgggcagagtgatcttcggagacggggtcatcgctgatacaaactccctcttgtacataatgccgataatgcttttatactaagataattctctaatattgccttgctagaataacatagaatggataaagacactcctggggcataatagagatatatattagatagaacggtctccaaaagaccacaccgttgaacttttgttcacgaactgtaatggccagtgagttgtatgtctagcaccagcctaaagataactgcgtacataattctagagcaactttaatacgaaatcacatcactgaaaacagaacctccacatcattttactacctttccacacgtttatgtagatgccgcctctgaatcagtatgtctctccgaccaagacaggaacattgtgaccacacgagctctagtttttgacgcgtaacatacctatcttacgggaaacagcttaccgtgggctacggaaggaggtcatctattgggagatccagctcatttcgtccttccgagaatggctttgtaacacaaatgggcagagcagctataacttgactatagacagacgggagctttgccattcatcccaaaccagtaagcattctttcctcaataggtatattgacaacgctaatactttgacgacaaacagcggatacagtcgcaggaggttttgacttccctctgaatgctcaagataccagccctagtaatttcatcgcaaacgccgccacaatagtgggcggagaagatcacccggagtcgatggctttactgtcgtcagcttccaatggcgtcaaggggacatgggtcggtgtggattaccggattgggccagtagtgatagaaacaacaggccatccaaactgtgaggactgcgcacctgggtaattgaatatactagttccatcacaacaaccggcaggtacggcatgtggggaaataacggtctgggggccttgagggtgtgattgaactgaggctctcaagttggtgtaacatgagacgaacataagcggatagaaatatcagagaagtcactgtaattatcagcttattctcggtctggtctgattttctcccccaacccccttcattcgaagctaggtggtctgtacaggtgtggggatcattgctagtctctgtgccacttcggccattccagcgctccgccagacccggtataccgcgtagtcaccacgttcgtctttaggcccacaaagattgaagatgttctgtattgcctcatctgtgatttggtttccatccgttgagaaaaaaagtacaccactctcagtgaggaaatcaggccggtcgagaatgacaaaaaaggtacgagatggtacggcatggctacctcactcccgggatataactttgcattcgatcctgcgggaaagtccggccgtcttggtgaaccgatcctatagctacctccggtcgagatttcatgagatcccggtgcgatgctaggataacacctagggattgagatgctgagaagaactcaaaggtgattgtctttcagcgaggaattttattgatgatcgcagcagtagaggcctgcgcaataggcataagtcctagcccgagttgttgatgaggaaaagcgatatgaataatgtaccgaggggctggttctggtactgttgttgtaggatgcgatgtaatgacgacagacccctcggaaggtgattgtaaattgaaatccccatgacgtagtgaattgacttttctatgtagcaactcgatgacctccggcggtggaggctgatatgctaaggatgggtctccctcatcttcgtccaaaccataatcgaactcataatccccaatattgcagtgactcagcctagctaacgacgatattgtccgcaagttgtgacgcattgttcggcactttcgcaccacgagttcttctctttctgaatagacaacacatccatcggggattgttgaaggatcaaagctaaatggggagaaccactcaatccgggaacggagatcaactttcgctctaagcggaaaacccgattgaaatttacccacggcggacctgattcggcttcataatccggttggccgctagcacggaagctataggatgtaatcactaagagaaacccttgcaaaagtcggtcctcgttgggtgccactttggcaataccagtaaaaaagcccttctcccgggaaattattctttcggtgaagaatctcgcgtctttgatgctccacgcaggtgaatacatcaggctgaggaccgtagatctcaaatgatagttggggatagtcatggatcctcgaagagagatatcgacaaagagcggtatattcatgctcggcgtccaagtctaggtggacagtactgtaaacctggatggcgatttctggaataggatctaccaaggcttcagggttggtcgcccttttcgccatcaaaatcgcaggttggtttgcatggtctcggtaccgttgcgcattccatttcgaaagcggagccctccaccagtctttgatcctagctatcgcgctgtttcttctgtgggatgagaggggacttccaaggttggaaggctaaggcgctgaatagcaacgcacgctcccatcccgatgtcagtcacgtgagccacaagcgagcggtagttaacttgtatgtaataacatttgcaggcatccaagggaggtcgcgtcttttatacaatgtaggttgatggcgtagtgaggcgctaaatccaaaaaggcaaaactaactcgaacaggcaattaacaggtccgccgtttacatggaagatgcatggtatcgctgaaaagaacaaatggcgccagagccaggctgcttttacgatcatccgcgaatcagggcgattcatacagggatttagatgttcctcttcaagatttcttgaggaactctgcatccgtttcactgctgccgctctttcgggcatcatcgaccatggcgtcaatgccccgttccttgagaactttctataagcattacacacctctgtcagacatcttgaatatatagagacacatagaggacatatcacaaggcaggacttacattcaaacaccccttgtagttcttaaataatgcttcgcaatcattggatgaagtgttgccacgcagatattctgttctaggattagctgctgctgtcatcgaggccttttattgaaggaaaatagtagcatactctcactataccacttgaggaagcaagtgtcatatttcctggtatatatattagcttttggttaacactttgaagctaggtatgttcactatagctcactctttgatatcgttacattcgggggcgatagaagccgccatattggacgtaataggagatagtttatcagatgatatccggcagaccttatacttttcttgctatgtcgaactgagtatattgagtattttagaggaatgagaggaaaagaatgcggtgacaactcgaagatcggcggaagtccatacaaatatcgccactctgggaaggcggtcagggcgggcctaccatttctccattgacatttttttcgggaccttgaatcttcatgtcactactgtttcgcgtttcttttcctcattcttcctttcgctagatttagtgaactggagctctgcaagtcatcatggactctgcagaatttgcaccgttccgggagaagttaacctccgctctggtgcaggtgacgcgaactgtcggacagctctcatcggaagacctgaacttccatcgcacctccagcgcagaattttctgagtcgctagatgaacagagcgcgcgcatcattgcgctaacctccgccgttatcaaagctgccaccgcgggaaccgatgtgactggaccaacccttcacgatgaagattccgtcgaggacaattggcgtggcgtggtggatgtgattgactcgcttttggaaaaggccgatgcctgcttggatgaattcactggtgtgattaagaagctcagcccttcccaggaagaacgtgcaccgatcaagaaagcgcccaacttcccgactatttacgattatggcccctctaagatccccaagccgcaattgctcttcgatcgcaaaccggataactctgatatgaacccctttaagcctcttctcaagtctaagcctcatgcgattgtaccgttggagaaatgcttgaagacgaagaagatagaaggtgtaattggttatcctcacccttatgaggcggagattcttgcttcagagtacccgaagccggtctatcaggtctcccctccggttgagtatctgccttttgagagtaccacggctactttcgtcgatactttggatggagtgaaggaaatgctgaaggagctcaagaaagcgaaggagatcgctattgatttggagcatcacgatgtacactcttaccacggtcttgtctctttgatgcaaatcagcactcgggacaaggattgggttgtggataccttgcgaccttggagagaagagctgcagatgctgaacgaggtttttgcggacccaaagatcttgaaggtcctccacggttccaccatggatatcatctggctgcaacgtgacttaggcctatatgtggttgggatgttcgatactttccacgctgcatctgcattgggcttcccaaaacgaagcttgaagttcctgctgagcaagttcgtcaacttcgaagctgataagcggtatcagacggctgattggcgggctcgtccacttccaccggccatgttcgactatgcacgatcagacacgcattatcttctttacgtctacgaccgcctacgaaatgacctgatcgacaactccacggaagaggcgagccacattgattacgttaacgagcggtctaaacatgaagccttgcaacgctatgaacgtcctatttacgatgccgtcaatggatatggccccggaggctggttcgatatgttgtggcgcaactggagccacctttccaaggagcaattcgccgtcttcaaggctgtccaccaatggcgcgatgaagtagcgcgcacggaggacgagggttggcagtgtgttttccccaagcacatgctcttcaagcttgccataactatgccggttgatttggggactctattccgaaccctgtcacctatgactccgattacgaaggaacggtcacacgatcttttggatgttatcaagcaagccaaggttgccggtattgatggtccagaatggcgcgacgtggcaccccctaaacacctcgcaagggtcctagaggctgccatcccggaagctgtcgatttccccattgctgaacgctatgaaacgtctcaattttggggcaacgtcttggaagccagggaatcacccactcccccagaatatgcgcttgccgccggtgctgaggctatgcgcctttctctccccctgccacccatgccgacgaccgtctccgaaacccgtgaccacctcggcaccgcaaaacccgctccccttaagcccacacccgctccccaggagccagaggagaagaagtacttcactgtcaaagacctcggcggtccccgcaaacgaaaggtcactccaatcaacaacccagagcaagccctctccatcgcagccgacctcgacgacacaagcaacgaccccgactccacgcaaaagaaaagcaaaaagtcgcgcagggagaagaaggccaagaaatcgagatccgaccccaagcccgagggcgaggctcccttcgactatggcaacgccgacgccgtcctcaacgcgccgtcttctgccacagtcgcgcaccctcgcaaaaaggcttacaacccgtacatcaaagcgttggaagccccctcaggcgcgcggaagatcaagcgggaaacccccggtaagtctcttacgttccgcgaatagacggttagtccgtcaaaaaaaaaagcatttacgaatggggttctggttgggttttctttcctgttgtttattgtttagattattgttagttagcatagcgatacccgtcagttggagactctgggattactgtatgtacatgtatagaatatcaggttcttctcggcaaagagatagtgtgctattcttgtaaaattaatgtttattctatttttgctttttcaaatatttctcgatcaacagtaattccgcttgaaacaccatctgtctttgatctagatccacgcgatagttagtaaaaggagactatgtttcactaagcccaagcccacaagttttctgggtctaagtctaggttggactccgtatggggtagaagtcaaagactccgcattgaccattccccgctataaaaagcaaatatgaaaagaaacatcaataaatgcaaagttaaatgaatcgcaaacgccaacccgggagcataagtacataggtgcgtactttgtctggtttcccgggactttttttcaacgggcctaaagaggcataatgggtgcgacgatcgtatccggtttgatgggttcggagagtaagataggtgaactcgacataattatatgcgcagtaatccaatccgtactccgaacagcatagcagaggatgacatgcacacacccactgccgatccctactatatcgccgatgataacagctgatggtcatggattccggcataagcggaaggattcctatccgagcgcgaattagcggaagcccggatcgctcaagcgggccatggatgtctaccctgtttttttgtagtacttatacacagatggattttatatgcaaacactagccatggatggaagtatgtggtgatacatatcaggggttggcaagtgatctacagagacttggcgcgtttcataacaggatgggatgcatattggcccgtgtgaatgatcggccggatgaggatgatattctcgagggagccaaaagccatgaagtcatgtagagccatgttcggtaatcttaaaatgcatgtctactttgtacatctgcatgtgtattatgtgtagtatgcatactacatcccacatgcatgtattgataaggggaagttcgcggagagaatcaaactctctctctgtctccccccactcactccactttttccgttcaattacccctgagaaagaagcatagaccaggaatgcactgtcgaccttgaatttataacgtccgtgtcgagggattttgggggaaaaaaacctcaaggtggattcagtgcacccccgcatagtttgctttctaatgctgatatcaatttaaatcaatcagcccagttccgcatatcattcgatattcattggataacaagaaaaaggcaacttggaaccttgaagactcaaagtttggtttcttcccaggggttgtcccagtccactggtactgcaaccccaacccactggttcaatccgggactacatctatgataggagaatatcgcagagaatatcaagaatcaaataaaaagtaaaacatctacaagcatgtcggatgtagccgagactccgctatggtctgagacaacccgtaggcataccacggatgtatattgtacatcgtatgtacctaagtggtatgactcttggaagaatgaggccatagtcaactaagtactgaatgtgtacagaagtaccgaatacgtgagaagattgattacgcgtaattaattgataaggccatactccgtacttggtatgggctcaacctgaaaccaggttgctgtgtcgagtagtttgcgagtattgtatccatattcatatattaggattcaattctaatctacggacaatatatatagacatcagcattcaaggaccaagtaacattcccgagacatccacatggaggtctcgtgggcttagcctgaacggttcaagtcttttacaatatagacgcaggtaccggttagcgcaacccccctgcagacatgaaaccgtgtcaccttcctgtaatacatttttattgggttgtgttatgtatgtccttgatgttattccttttctcgacccgttaagaaatataaacagagagatctgacgtcaggatgttctatgattgacaagtaaaacaagtcaaagtacggcttgaagttagcgcgcatgggccaaatcctgaagacaaggatgttgatcgagatcttcctaacagtccagggccataatctccagaaaggagggtgttcctaatagtggcgaagtgcattgggccaggggtaaaaaaaaaggctgtcccccttgcataacaagatacgtctcattcccaaatttgtttttttttatagaagagagagaatatggcagtaaaatgaaatagaaattaatacgaaataataacacaaaagataaagcagaaaaatacaaaaaaaccagttccccagaaccgccctaacagcagactaacgaaataaataatctcccctctttactttacttgaccctcaaccctcccccccctccttcttcttcaccttgatgattcttttctttcttcattgattcaccacagtaccgtggtaaatcggtctcgaaaaccccatatcctcggtacgggtgtctcctcttttacggccccattctctatcctcaagtccctacgccagggtcatcgcagtacatagtcaactctgacgatcgtcacccccccctaataccacaatgtccgttgcgacgatgctacaacccgcatccagacagtcacgggcatcctcgtcctcgtcctcctcgtttcaacccgtggcacggcataacacaatgtcgtcgcacgatactcggtcgctccgccaatccaagcggatgtcggtcacggctctgtacctttccatgtccgccaaagatcgagacttggagatttccgatgacttggcacgaggtacgaattctggcttatccctaatggtcgcgctaatcctccgacagcacagaagcacctgcgcgatttgaagtcgaggatctcctcgcaatcgaagaagaatttcgtgttggaaaaagatgtgcgatatctggactcgcgaatcgcattgctcattcagaatcgaatggccctggaagaggtaaggatcctattttcgtggcaatcgacacacatccgctaacctgtctttcggtccagcaaaatgaagtcgccagccacctcgacgatacggcagacccgcaggaagggttcttcccgaacgatgaacgaacccagaagtacggcaaccttcttttcctccttcaatcagaaccccgtcacatcgcccacctctgtcgactcgtttccatggctgagatcgattctctcctccagaccgtcatgttcaccatctacggaaaccagtacgaaagtcgcgaagagcatcttctgcttactatgttccagtccgtcctcacctaccaattcgataacacaccagagtactcgtctttgttgcgccaaaacaccccggtttcacggatgatgaccacatacacgcgccgtgggcccggccagagttatttgaagcaggtgctagcagaccagatcaactctctgattgaattgcgggacgtggatctggagatcaatcccttgaaggtttacgaaaccatggttaagcagatcgaagaggaaactggctctcttccagattacctggcccggtctgtgactgccgaggatgctgctgaaaatgcgcaggtgcaggccatcatcgccccacgtttgaagatgttgacggatatcgcaaacggattcatcacaaccatcattgactcggtagacgaggctccgtacggtattagatggatctgtaagcagattcgcagtctgtcccgcagaaagtaccccgatgcacaggatcaaaccatctgcactcttatcggtggtttcttcttcctgcgcttcatcaacccggcaatcgttactcctcgctcttacatgctgattgatgctacgcccacggacaggccgcgccgtaccctgacgctaatcgctaagatgattcagaatctggcgaacaaaccttcctacgccaaggaaccttacatggccagcctacagcccttcattcagcaaaataaagaacgtgtcaacaaattcttgcttgatctgtgtgaagtacaggatttctatgagagtcttgaaatggacaactatgtggccttgtcgaaacgggatcttgagctccagatcactctcaatgagatgtacgtcatgcacggtctcctagagaagcacagtacatcgctagcccaagaccaatactcgcacctgtctctgctgctccaagaattgggtggagctccccctcaagttccccgcaaggagaaccgcaccatcaccgtgcctttgtttagtaaatgggagaccgctctcgatgatttgacagccgctctcgatatcacccaagaagaagtgttcttcatggaggccaagtcaacctttgtccaaatcatgcgatccctgccacagaacaccttagttgcacgccgacctctacgcctcgaccgcattgccgaggctgcagcaaccttgaaaaatgatgccgtaatggtgcgcaagggcatccgaaccatggaactcctcagccaactgcaagacatgggcgtgattgaccgctctgacgagtttagtttgcttcgtgacgaagtggagcaggagctggtgcatctaggctcactcaaggaaaaggttctggaagagacgcggaaactcgaggaagttttcgcgactattcgcgaccacaatgcttacttggtgggccagctggtaacatacaagtcttacctccacaacgtgcgtagtcagtccgaaggcaagaaccgtggcggcaagacgccaaagaaccaggaacttggcccgtacaagttcacccatcagcagttggagaaggagggtgtcatccgacgcagcaatgtgccagaaaaccgacgagcgaacatttacttcatgttcaagagtcccttgccagggaccttcgtcattagtctgcactataagggtgagtccttggatttaatcttcgaggaaaacggaacatcattgctaacgcattatttaggacgagcccgtggattactggaacttgatctcaagctggacgatctcctggagatgcagaaggataaccttgaggacctcgatttggagtatgtccaattcaacgtcaccaaggtgcttacactcttaaacaaacgatttgcacgaaagaagggctggtaagggcgctatacaccccaggctccccagagtccccctttgatgaatgatgagctcgagcggaggtcggacagctccccctatttggtcttccatatttacttcgcctgctcagccacctgatgaccgaccgtgccctaggcgcttaatcttgcgatgaagatggacaaatatgtcatgcctctccatcccaaataatagatcggatgactgctctatgcaccgactgaaatctgcccatctatgcagttcgggcgaatgccctttgtgcgtgtcgccgacacgcatatactcttaatggagaatgatcaaggccctctccccgctggtacgggggatgtcgatgatcctgtgatttgtgtcctttcccctatcttttcctattatgcttgccattcctatgtctctcatcctttcaatgtctatacccagcgcatagttgttaccatttgtttttttcccggtttcattgggggcccgagccctataatcccccggcatgtccttctgttttgtgtttcaatcaccgcccaggcctgtccggtctcatgcgctgtgtataataatgcctatttgtgatgctgtttgttgaattgttttcaattgaatacccgtatgttatgttgtgaatggtttatttccccacagaatgcctaggcagattacaattcatttcgggactggctactgtgatatatctgtcttctttcgtaaggtctaatatgtcaaatgctggtgtccactgatagttatagagtggattgattcgtcactcgacacctcgacaccgccacgtctgcccctcgcctgcttgccccctttttctcgagtggaatcttcttttcaagtatgcgagctgtctgaatatcaaatttaataaaagaatagtacaaatttggagtcgggaacagacaggaagtgctatatattctatatatgctaggaagtacatacaatagtcgatcctttatacccaaatgacaacccaataactcaactagtagtcgacttgcaaaatgacgatagtattggcccctgtaaatccctgggaacttctttggcaaggtggttttattgttgttcaataattagaaataacattggtccctagggatcccccaggcttttttttatcataaaagtggccacttacgctaatcccctccctccgcctcccgctctttttccagaacaacaaccctcctcttcccttcgaccatatacctcccatcaatcacaatggcggccacagaatcccagttgcctacggatcctaagtacgaccactacgacttccccaccaccgctccggaaacgcagcctggtcaccccggccacacctcccccgagcaggatgcaaaggtgcaacagctccgcgctgagctcgaaaagctcggctacaccgaacgcttggatacgctgaccctcctgcgattcctgcgtgcccgcaagtttgatgtcgaggccgccaaaaacatgtacgttccttgattctcaaagggcatggatgtttgttttttggagtagttggcagaaagctttctattccggaatttcttagctttcggctttttgtcgaggcctaattgtctaacttgatatctcaggttcactgcaagcgagaagtggcgcaaggagttcggcaccgatgatctggctcgcgacttcaactacaccgagaaggaggaggtcttcaagttctaccctcaatactaccacaagacggacaaggttggttttctgtagcttatacgtattcagatgcaatactgacatagtcccaaacaggatggccgccccgtctacatcgagaagctgggcaagatcgacctgaaccagatgtacaagatcaccaccgccgaccgcatgctgcagaacctggtgtgtgaatacgagaagctggccgacccgcgtctgcccgcttgctcacgcaaggccggcaagctgctcgagacctgctgcaccgtcatggacctgaagggcgtgggcatcaccagtgtgccgtccgtctacgggtacgtcaagcaggcctcagacatctcgcagaaccactaccccgagcgtctgggcaagctttacctgatcaacgcgccgtggggcttcagcagcgttttcagcgccgtcaagggcttccttgaccccgttaccgttagcaagatccacgtcctcggcagcggataccagaaggagcttctgtcccaggtgccccctgagaacttgcccgttgagttcggcggcacttgcaagtgtgagggtggctgtgagctctccgatatgggcccctggaaggagcctgagtgggctcgtacccccaagtgggccctgcctaaggaggagccccctcacgctggtgagcttcttattgaggacgaccctgcacttgcgaagaaggatgtcgagggccaggaggctgctcagactagcgcctaagcttgctgagcacgtttccttgtcttcttcgttggagatccaacaagccgattgacaatctccttttatatggcgactgaaaacagacacccagatggggatgctggaggtttattttcaactccgatcaacctgaaaatctcaaaaaaaaaattatctggcggttcgacaacccccaatacaaccccaattccacaaggcaaaccggaatttctctcttctggtagtttcaacacctctttcccgatccatccacagcatgtggacccttaccctacattcgctttttgcgtgtgctttttttgttccgatctagatatcatggagagcttgcttttgtttttgcttttgcctatcaagataagcagcgtgtggctgccactgctctcagtatagaagggacaggacgcgatgaaatttaaaagcgagttggtgtgaagatggtgtttatcttggttgtttctttgttggtagtgtatacacgaatgagcacatattgaaatggtagctgtcatgtgtaggacactatttggtttttgttatgcttatgcttatgatatacgatgtagtagcagtagcagtagcagtagcagtaggagaagtagaaaaccaacaatatttgcctttggtatagagatcgtagacagagtttagtctgaacatgaaagacgatatgtaggattttgactcaatggagccatcaagaagaaaagacatggtatcatgatccctaggacaagcccaggccccccaaacgcccccaacaaattgcaagcataaaaagaaaaaaacgaagaagagaacgctaatcaaccaaccccaaagtcctcaaggcaatcacttattcatattctccacaacgtcagcagcacggccagctctctcagccttgcccaccgtcgttgccaacgcattaccctccacaccggcctccgtatcagcattgccctcgccctgcaagcggagcaacatccgcagagcatcctgatagacactcgcaatatccccactcttccaccgctcctgctccgcctccgtcccgagcgcagcctgcaacgtccacgccgggtcgtactttgcacgggcctgggcccctgtcctcaccgacccagtgccgttcgggatagaatcaatatccataccatccggctcttggccgggtattgtgttctcgttttcattattcgattggggctgcagattcgtagattcgcccatttccgtatcgttatcggcatctttccccccatttccaatcttgtcttcgttttcatattcctcttcctcctcttcaatcatcttcttcaaatgcgcggcatattgtttcgccgcacgtctcggcgcatcccgcctctgctgcgcgactgtcgtgtttagagattccagctgcgcgtacagcgatgtcacacgcgacgcaagttctgtatcgtatgcttcgtactcgatttgttcagtcggcgcggtgaatgctgccgggaaagggaactgtggtgaggtggagtctatgccgttgatgctgattgaggttgaggctgattcgaaggtttggtttatgtactatttgaagttagagtctagagatacgtggatttacatgttgttctggtctcacttcgtcgattagctcccggacgcgttcgcgcatcggatctggggtgtcattatccgttgcagaaggggggaagtagaggtcgagtttgcggcgcgatagggcgactgtattggcgtagaggtaggtgaagtctgctggagattgaagctcgacttttcgatagtgtggtgctgccatggtgggctcttgtggttgttgatgtttttctctgttccgatttgtaggagaaatggccttggcattccaaggttcatccccgcaaacgatgtcatcgatgttgcaccaacttactctccaaggttgactttttttgctctattgtttcttgttttctgctatttatttctttcgttaagataatttacagataatctacacttcttcctcctcatcttatatccttccttctactctgatacgaccccttgagataatgcaagtgcagcatactcagtgatattctacactacagggctcgaggagccattgggacacatcaccactatcctagacattcctttacataccctcacaccgaatatggagaggtcgacttccatttccctcgtggataacaccgtcccacagcaacccaccggtgaaggacctccaccgggcacatcaactcatcaccacaaaagcctgacgaagcacttgagccgtgcatccgtccacagccagctcgcaaaacggaaatatgcaaaatggcaaccggatagacttggcatcaagcccgacacgaacgactcgcttagccgagaatcgtcccaggtgcgcggagactcgatatcagcaagctccaccggagaagccagcgggaccggagatattgagacagctgacattgccccgtcgcgagtctcgactaataatgggagcggcaacggcagtggccaggcgaccggaataggagaccaatccaacggccatgaggacaccaaatcccgctcagaaatggacgttctctacgagaaccagcggggctggttcgcttttggtatcccacattactcgcacagctcactgttgaactttgatcccagcccctggatgactcgggaccgcagagtcagtcctgttaatatcacaaatgcccagctgcctgatccgagctgggagtggacgtggaagacatggtatgtcgacatgtctggtgataccgatgagcaagggtggcagtactctttttcgtttgcctcgtcttcgtggcatggcacgcagctgtggttccattcgtttgttcgaaggagacggtgggtgagactacggactaaggcccatccacggcgaaatcgtgatcgctcggacttcgagaaagcccacatgcttaatgaggactattttaccattcattcgtccaaggccagaagtcgggagcaaagcaccgcaggactgtcccgggtggacactggattcttgactcatgctagcgcgacggtcgatgaggagtcagatgtcgatgagattgcggatatacctagtttgatgcatgctttgaaattagcctccattgatcgagagaggattgatgcactgaagaaatttattgaagttggaggcgacgagctctattatctgaacgacaaggtgagctgggtgatttcctctaatctatatgttgagaccgggctaactctattttggcatatcagataccagatataatgtccatgttcttattccagacctcacgctggcaatttgtaacatatctttctgatgtcattcgcgggctctccaaaactcccactgattctgataaagacgccgatgcagtccaacgcaagaaagacaatctcgcccgtgccgcagaatcctgcaagcatcacattaccgggccggatttctttaaagatgatcatggggagtcaggaacggaattgttagacttgactccggtggccaggcatgatacactaatggctaagcgaccggtcttgaaggagcgtgtgaggtcgatgaaacggattttcaagggcattcccaaggccgctgagattggccatgaaggacacatttattaatgtattaaaagctctctgtatagaccaaataaatgttgttattgggagaatcacatagcgaagtatagcagctcacccggcagagccaacctccggccaccgcctacccgttcggcggctagcaattttcggggcaaaaaggtccatcgaaaaacacctcagcaacgcgcccaattctactctcctttccattcatgtctccggtgccattagagcatcgtcccttatgctcttgcgtggccgcccgtgtctaaggaggcgtctttctgccgtcttggacactgtcgcgactggcccgtatgagcctcttctgtttctatatcctcgctgggctgcgcctgctttgcaacgccgacagatatcttccctgaagtcgattgatactccagcgaggataggacatacttccagtggcccaattcgcgcagcagtccgcccttctccttcgctttctcggcactcgcgccaatggatctcctctgtgtcttccgcccggtctcccgacgagtcaaatctgcacccgtcccctgcggtggttggagagaattctaatatacgcaagggcaaagaaactggctccgatgatctgaatgaaagtggtggaggtcggctctccgcaggtcagaaacaatctgtcaattcccttgcagatgccgaacacgccacttctcgagaaccgctacggggcttcgcgttgacaagagcgaagagaatacagcaaggtcgactgcataacaaacccctgaacgccaaaccttcgtctcccacgcagagacagctttttttacgaaatacatcaattcgagatcggaagaagttgcggtttcgcgaatatatgaagaaaaaatatcaatctcgttcagcaaaactcttcgacaatgcttggtttgatacaaaggagattctggaccaagtgtaccgcgatatccggaaaaatccccagaagagtttgaacaagaaggagatacttgtaccagaggagacccttgctctgttttctggtgtaacccgttataccctgaaagagaatatttggtacattccgctccacaatggatgtcgtgtgcacatcctacctgcaagtcagagcaagggattactccgtcgagtagttttgagtgccaccgaccatatcatggcgctggtggaagggcattttacccgtgcacagagcctacaagctatgggagatccactggttgatattcacaaaccaccggttccaatgtgcatttctcggggcgcgatgcagcgttcgaagctgcctgtaccgttggttcgtggaaattggcatttcggtcaaacatcggatagcagctcgaatttggacgagatcctgctacctcgtccggttatcgccaccgtgaaggagtttaacgagcacatcgaggatgtcacatctgcgagacaaccaacgctcgatgagaaggccatgtctctatcaaagcttccgcacctggtccgggttaaacgacatcttgaggcgctattcatggaaggaacatactccaattatatctcgactgcggctttaaataatgcactagaattcctttgtcggcatgagttccttcaaactgcccgatccttgttttcatgcacagagcatgtggctaccactgatacatataacatcttgttgcgagctgctgcgcggcgtcaggatgtggctgtctttcgtcacttcctacgaatgatgcctcgattacacatgcgcccaaactcagaaacatggctcgcattgctcagcgccctagttgaccctagcgaaaaagcccaactcattgaacatatggttcagcgtggccacatgtccaacctttccaccatccacagcgcgctccaggagacaatccaagattcgcttctagtgcatttggacagtgggcaagatataggctcattcattggcctcatgaccaatacatggggtgctaattggttcagcccttccattattggccagatgttcagtgtgctcgctcgattgaagaagttcgattccatagaccggctcatggaaatctgcatcgacaacaaactcaccgttgacagttatccactcggccatatcgtgcaagcgctgggcgcgaatatccacgtcgctttgcagtataccctgcggttcttcgagcacccttcgttcgaggtaacctcacaaaattgggaggatttgtttttggctgccttcaggcaccgccagtacaacatctgtctagttctatggcgatattcttgcatgaaaagaaccgtgacctacaagatgaaacaggctgtcttaacttccttatgtcgcaatgcatcctttggtaaacccacgagactcaacaaagatttatggagttccgatgccggcaaggtcattatcggtatcgaccaaaaccatgaaagctacaggctcccagactctattcttgacgatataccttccgagttccgtcacaatcctattctctacctcatcggatggaagcccaggggtgaacagcgtgatctccaaattcgccttgccaatgccctcattaagcgtgacatgattcttggtgcaactcgctatgtcccccagcatccttccccgatcatgctggatgcagcgtccatcttggatcaggaatggcgtggtgtcccgcggcctctgacttggaagatgcaaaacgccattcaagttcccatcgtccgcaaagacaaagaccgagagcaagacaaaaacgaagaccaataatctcccaatcatcctcccctttgcatcctcattcttcgatccttctaccttttttgacgctagcgtgttgcatgaatatcccttctggcgggcttgttttggctggtgtttgttttctgtacgctagtctgcctactttcccgtcaccttgtatcgtatacttgtacattatttggaaatatagaatcatagagcttcaatgtccagaataacgccatctgagtatatattcattcaatcgtgagcgagtacattccctctttcaaatataaaacccctcaaaatctaagcaatgcatcgagatcattcataaaactattataggcagaaatagggtcttcaggaactctctcttcctccggtgaagcaaggcccccattgagaatttcagcttcgcgagccagcgcgttctcccacccaatccttgtctctgcaggcatcggagacagagaccgagactgggaccgagaagcaggtatgctgatccccttcacctccacacaatccgtatataaaagatcagactcaaagctcccgggagaatccagcactgacgaatacacatcccgccttctctcattttgtgcagtttggcagtgtgtaatgcctcctccaattccaggcgaatgtggggaagtggaagtagaagtagaagtagaagtagaagtgagggaaggtagtagccggcgcatctcggagtagaacgaatacatcgagctccaagggggtatatcgtgatcggtttcttctggcagatagctgttgagctggagttgaggttcgtgtttattacaagctttctggctgttgtggttgcggttggacaattgttgccgagtaagtctttccaacagttttgtaagtcttgctagtatctatatttttcttccttttaacatacctgtcaattgaatctcgcgggatgcaggcttgaccttctttgcggcagtgggtgcactgtttatatggtggggagatgtcacatcgctttttccgggtgtggcaggccacgcaggctatcttgccaggtcgacgaccttgcttatttgcttttgtaatccccgatgggccttggagtcgaattgtgcttaaatccattggagcttgaatatgaggattctaaaatatagacgtaggtgggctatatatggagaacgggtgctccacacttttatgatgatccagacttaccccaaaagccggcacaaccgtgttggacgttccaaattggggaaatccagaattggggaatggccaatttggggaaatcgacctcgggagaaattggggaaatctagaattggggaaatttccaattgtggcccatatcgtggcgattgacttcaagagttcaatgttacagcagcattcctaatatacaatttcgtgttatatcattccgtatgtgattctaatttcttctcatgacttattatgtatgagtcgtaaggtcaataactactactccgtactttggactatatcattctacgctaccttgctggatccacatagaataggagtacagacacatgtaaatggccagaaagatcgacacaggtcttagattgtttgcacaatcgcatttgaatcgcagttttcagccacggcgccgggagtgcccgtaaaggatagacaaccctggagatcatgactgatctaaaacggaatgctacacctgggaatgttcctcgtataccatgtatagattgagtcttgttcataacccaagagcatactgttggaacagtatattccgggctcggtgcatactacctactccgtagacacggcatgccgagaagcggtgcggggacattggcttttgcctcctttccgttttatcaacgtcatctatgatcttctaataataaactcatgatgattgcatattctgctacgtagtgcaaattaccctagagccacctctccaatctcaccgcatatgcttctccaagcacttcaagatttgaaacatttttgtacccaaagcgacctcgaaatgatttcagagcactttgaatagctctatcggtgctagctcactttcctctaactccaatatagtggatctgtcaagtgtgatgattcaagctatcaagctaggaagaacctgctcctctatggagtgcctttatttccggtgtatatatgtcagaccatcaacacgtcttttggacaacggaatggatatcaaccagtcggtgggccatggatccccgaattttgggtgagtcgagctgtcattggtccaaagctgcctccttgtgacgtccaatggttcaatactaatcccttgtaccatgtcgagatgataatatgcttcttgatcacggagccgatcctaatcgtcgatgtaatattgaattccacgccactctcctacgctgttgaacacgcttctttgccactcgtgagtctgctactcaatcgtggcggcgacattacagaagggcaggttttgcaccacgcagtttctcgcaactccgatgcagtggagctcccgaagctcctattactcgatcaacggtatcatgtatcaatgccatcggccttcttgggacatgaatttcttagtgggggaaactgttctgcacaaggcagtatttctttgcagattcgatgtcatccattcccttcctagggagggagtgaaccctaacttcaaagatgtcagaaactgaaccgtcatacaatgtgctgatgaaaatatttggaagaggatcccaggatgggcacaatactagttgaggcaaaggtcgacataggggacagcatggaaatacaagtacatatgtaggtattgcatccctcttacatgacatatcttcaatcaaaccatattagctattcggcacactgtttaggcaatttgtctttctatacaatataagttccacaaggacgccagctctcgtgagttatatatattctggtcatttcccattatcatgacatatcatgccagcacagcttgacagagcaacgagttaagttcaaaacgctgcttacaaccaaaaatcaaaccaatgaccccatgtttgcatgagaatgcccttcacacctatcagggagaccgggtactggtggtggaagaccatagggatcaacaagtgccgtccgaatcgcacccacaccttctttaaggtagagcacaagccggtaggccgagttgccattcaagtaatatcggtggagctgtttgctacgcaggaagcccagccgctcgtacagtttgatcgcgccagtattggtgatttcggtttcgaggacgatctgcccaaacacatacaagtcagccacaataccctcgagaccaccctatttgcggaccaatagccacctccactgtgtagacctacctcatctgcatcccgctcgatcatagcatcgatagccatgcgcactagcttggttgcaattccccggccacggtactcttcgcgcacggccagcatggcgatataacctctcagcgggccgtcgcggtgtggctctagcttcgataccacgaccccgaccatctcgtccttatcgtccatcgcgaggaaacacaggtcaccccattggtataagaagtagcggtagacgtagatgctgtaaggttcagacagatctttggagatcagctggcgcattgcggcgacatactccttttcgcgcgaattttcatatcgcacgtagcgaagatcgggagcattgctcatcacagcgatgtcattgaagtgggctgatggttggagttgacggaggggacgggggtgggatgtgtccgagaggaaagttactcgcagccatgtgatgccgatccgcccgttcgcggacttatgcgcttccgtgtttttgtatccccttccttttcttcctgctttctttttcttcgaatttgtttgtcttgttcttgatattgatttccaaggcaaatcgcacccggtcctctccttctactccctccctcgcggttggttgctatgctccgtcgccgcacgggcaaggacggggtcccgccctctaacaaagatagcggtacagaaaccaaggaagaacagcttcgtgcggagtctgttgatccaaaagccacccagctagttatcaagccccggagtaaacgtcgcaatgggttcatctttatgttgggcgggatcttcggcatcttcatcgccttgtttttcgcaaaccagcatgaggtcataagcctggattcgctcatggacctaaatctcgattcatggattgatgctatcccacagggaattgtgagtgacgtgaaggaattctcggtacgtgcttttttcaagggctcttacctctacatctagttaccagttgactgacttccaaccgggttatagcaacatgaacgcgataccgtcagctatgattcgtttgccgttgggctacaacttcgcgccatgggcgtagaagccaaacaccctatcgtgatgatccctggagttatctcgaccggcttagagagctggggcacgggggaaacttcgcgacaatactttcgccgacgattatggggcagctggagcatgatgagagcgttagttatggataaagctgagtggaagaatcatgtcatgctcgatcgggaaacaggccttgacccgcctggcattaagctccgtgcggcgcaaggattcgatgccacggatttctttatcacagggtattggatatggaataaaatcttggagaacctggctaccattggctatgacccgactaatgcgtttacggctgcatacgactggcgactttcatatcccaaccttgaagttcgtgataaatatttcactcgactcaagtcctacatcgagaccgcagtgcacatacagggcgagaaggttacattggcatcgcacagcatgggatcacaggtggtgctgtatttcttcaagtgggtagagagcgaggaccacggaaagggcggcaaagactgggttaacaaacatattgactcgtgggtcaatatcagtggttgcatgctgggtgccgtcaagggattgactgccgttctgtccggagaaatgcgggatacagcgcagttgaacgcctttgctgtgtatggtttggagaagttcctatcgaaagaggaacgcgcggagatctttcgcgcgatgcccggtatctctagcatgctaccaaaaggcggcgaggctatatggggaaactcaacttgggcaccggatgaccaaccaggccagcccctgagctttggcaacctgatccatttccaggagaccaactcatctgtgacaaaacgtaatctcaccacgccagagagtcttcagtatctcctggaccagagcgaggattggtatcggaaccaggttctgggtagctactcgcacggcgtggcacatacaaaacgcgaggttgaagccaacgagaaggacccgcgcacatggctcaacccgctagagtcgcgcctgcccctcgccccagacatgaagatatactgcttctatggcgtggggaaacccacggagcgcagctacttctaccaggaagagaccgacccactggtcaaactcaaggtcagcatggacaccaccatcaccaacaacgagggcattgaccacggtgttttaatgggcgagggcgatggcactgtgaacctgcttagcacgggctacatgtgcgccaaaggctggcgcatgaagcgttataacccagccggcacagagatcaaggtattcgagatgcctcacgagcctgatcgcttctcgccccgcggtggtcccaacactggtacgtaattctttgcttccttacctacctgacctttccccacgatatgtaacaggcgactaatttcatataggggaccacgtggatatcctaggccgtgcctcactcaacgaccttcttctccgtgtcgctggcggcaaaggcgatttaatcgaagagactttcttctccaaaatccgcgagtatgcggatcgtgtacaaatctttgacgacgaatagatcaaatggggtcccttacgactgttctgaatatttgactcgcgttttgatacacttgatacacccacatatgtacctccttttagacatttgggattttttttttctcttctagacggatggggttttgcttacgatgcagcattcttgtacatttctttatgacaaaccccttatatgaacattttatattcctttccatggcaaaccctatttgttcaattatttaatactagaatacccaaacaaaccatgtcgacaagtccaaacatacgtaaatctaccctctcgtatcacggataagcccggatacggtttctttcctagccctaaaaatagggacttatgcaaggccattagctgctacttgtagcaactgatcccgtgtgatcgacagagttattggcccgcatgagaagcaagggcataacgtcccgttcttatcacactggcggggttgccggttctcctcacctcgaacctgaaagaattcggaagctaagttggaggatgctgtatacacatactacactagttcctacaagatgcgtttacaataatagaacccagaaatgtaaataatgtacaatgattcattcatacgctagtgattaaaaataatgctagcaatagttacccaacaggatctcaccgcgcccagaagtaatgataagaggtatgcacacgacccaatccgggtcgtgtagagggtgtcacggaaagcgtagatgtaataggttgtcggatcaggttcatcctcgatagccaaaggcaaagagaatgggtgaagctcgagagcaggtggcctccgtcaaaagtaccaagccctagctgccatgaaactcgagctctgaaaacaagaccccagctttcagtattccccttctttcctttcctcggatctctccgtgtcgaatccacacgggaagaatccacacaatatcgacgccgatcaatcacctgccaggcggcgtggacacagagggaagatcgagacgatcttttcaaaaacccccatgtgccgatgcaaaatgtcgtaaaacagccaattccagaaccccttctagtgcacatcaagtgtgcagcaaaagtgccgaaacttttcatctctccaaaaaaaaaccagtttcttaagttcccaggcgcctatgatgagcgagcgacacgaagtaaaaatatttgttcatctgaacgagccgaaagcaaaaaaaaaggtggctcgcccatttcataaagtcgtagcgaaagacatgggtcagaaaaatagaggggatcgcccgagggcgtccgagaatgtgtacaagggaaggttgacagcggtggcggtgcgagaaattggcgaatgcgggcaggtgaacatggcccggtcccttccgccaccagtattaatattatagacggagttgccagcccaaaaggtggggtagcgaggcatgtacagccagaaggtgaagagtaccttcagctcggggcggaagtaccgcgcgaaccggaggttttattaaaaccttaaggtgttgaagattgctcgatgcagataatgttcccaaacattgtcgtcaaacataacgccgattcaaaagtagtagatgcaagaatggactgcgccgagtgtcatgtgcaagtggagctcaaggattagcgcccggcctcaatatcgtgatttgaggtgagtgtttcgctttcccagttgtaatgatcgtccacggggctcaaagaacccgatgaaacagacgatgaagagcccacggtccactcgtcgctgtccaagttgaggtcgccatccaggctggcaagatcatacccggactcgcgggaagagtcaccgacctcaacatagtcgtagtcccagcggaacatcttatcggcctgaactcgaggcaggaatcgagtcttggcatagtagaaggcaaccgtggcaagcagaccaccgcagaccagatcaactgcatagtgatgcgaaagatacatggtagcccaccacatccacagggtgtatgtgacccagaggggcttcaaccgcgggaagacgtggctcatgaagagtgctgccagtgtggaatcggcagcatgcagcgaagggaatgcaccaaaaacaacaggggactgcttgaagcccgaagtgtagagatcgatacccagcagcttgtcaatgcgagcaagaccagccggatttccctgcatcgagtaatcggctggggccaaaccgtacagattttcataccagggtggcgaacaggggaaagccagctgaatgaagacagcggtcatgctaatgtatccgagagtccgggcgtacagaggggtagttcccggggggccgaagaagaaaaggatgagtgaaacgacgaatggcgctccgtaatggcagagtccgtaaggaatccatgccaaaatgtcaagcaccacattttggtgggcagatagaatgttactgatgttggcaccgtacaggatgttttccatggctggcaacactcggacccaaattgcgggccgccaatcgcttggaacgaatctagagaaacatgttagcgatgttgaattcccagcacattgctgctcacgccacagggccatggcaagcgcatatgctgcaggaaacacgagagaaagcaaaacttactggcaaccatagaagaagataagccacccagcaacgggaaggaaaggcaagaagaattgccgggtgattggcatcaggagggagcacaagagtccagtggcgatcgcagtctttccaagtggaccaggagattggatgattgtcaaggagaaaatgccgataatgaggagcaacaagtattggaagtcatacaaggtccatcggtgtgcttgtaaggatctgagggtgtcggcgggcgagaaggaggtttgcaacctcgatatggacgaggcgggcgaaaggcggcttcggagtttggaccggagcttgcgacgcatgcgatgtggtaccaggagctggaatgaacgccatggcacttggatttgaagctttccaaagtgatgctgtgtgcgatctttccatgacggataggaggcgctcatgttcgcggcgactctcctccaggagggtccggatcacttttggaaaaggggtggttgagacttcaaggaatgccgcgggacgagacagagggaagtcgcgtaacggaaggaggtttatcgttgggaagagagactccagaaaaggtgagttgggcgcgaataggaaggcgaaggatcgaggggcgtgagtcccagggaaactcaggaggtcacgttgacaagggttgggatgcaaggaggaaacgcaaccgagagaacccaggataaacagcactcgagaagaccaaggagaccactttagaccctgaagcggagatattaaagaattaaagaggaaagatgggagagaaggaagggaaagaaaagaactggatctcacgaagccttgtattggtattaccagcagctaagttttgtgtaattttaaatacatgtgtatagtgctactttccctctttcgtaggtctatggcgtcactatttggtttgggttttatttttttcaggtacgcaacctggaagtcggtctttctagcttgtcctattgcaatgctgaccggagctctcggcagtattcaataatacagtggacatccggtctgagggtttaactcggaagccacggaagccacggagatcacaattctgggcatatctcggactttgtaatgccaatggtccgatgttagtatgttcatgcagagactccgagactcccgagaacgtcatttatggcttccttatgttgtatatttatatcgtatatcgcatagttatatagatatagagaacatctccatatatcaacctcaatgacctaattctacttaattaacttcaatcgtggtatgtggtttgtaaattaccgagacgaaaatttcgcaaattttccatataagatccatcgccgagctctgattggctgttgctcccttgcccccatcgttgaggcccggtattgaaatccatccgacctctttaatttcgcttatgcacaacttgtaacatcttaccagttcaaccgtcgtcctggtgatcgaaccagctcgcctcatacgaaggcaatcggcccaacgcccaacgcctactttgtagatgctactccgtatacattataggcattagcattggcattggcattggcattgaggaaactcagccccggttatgcggttgagccacacacgatcagcactcaacagtcctaatttgactgacactattactctgtgctccgtagtgcggttttacatgggcccagcgtttagatgaggacgtgccttttctcaggggataccaacctcctgatttaaacagcaaccagtgaacttcgtactccgtacaaccacctctgctgtagaaagagattacactataaaagacgggacagctgattgaatatactttccacccctcgactccgcgtttcagtatcgcgcgcccgcagccaattaccccttgacttcataatctagcgtcaaagctccctggggattttacaataggcagtcgctattccggactccgtactccgtacaatgctccgtatcccgaggcttattattacaatatcttacttgactattgtattcatctttccatcgaatatgacagcgcacgttcgtattcgtatctggaggcggctgcctagagtgcccaggtggacggtcaggcttagaagtgatgtaaggctgatgtgtagagctgcgccacagatatgaagtcaacttgcagtatccccaacctaaggttttgttcgccttgctactaggccttatcgggatttggctgcaggtcaagaatgtaagatatgtgatcttacttgtaactcacagcttcgttgtcaaagatatgcaaatgccagagactcgatttgcgtgcaaaagcccttggcattacacaggattacatgtcacatttaatagctctgggattacgcccgtgcttatttgatacgaccgtttctgcgtcgtcgatcctaccaggctatcatactacgtccccgcaaacccgatgcggtcggtgggggaaaatgactacatacgccgtacatttgcgttttacctcatttcttacgacaaaataaataaattataaagagagagtttacattctcgtagccgtgtgctgtgccaagtataggctaccctgtaatatgtcaaggttgtacatgcgccgagctaattatacctcttttccgaggtcggctaagcgcttctctcgtcattcattgcatatgctgcggccacggagatgaaaaggataataatagaggcttgtgcattctgttcggcgcttagcttgagagtctgctgcctatataattattcgatatatatagtatccaccaccccacgcatcagactacaccgccgagcatacttctacaaatcttcaaagttcacagcataccttctcatttattgcgttcaatatgtcatccacagtttcaatttatgtcgccatcagcgccagcgagggcgtttacaaacactggggtgttttcatcgatgcaccccgagaagaagacaaaatgttcctccaggtggcaggttctgatggtcgattccgctatgagttggaaacaacagacgttcgacaatcggaaagactggtggagttgctttttctatatgatgtggacgtcaccgaaattaactccatccagacagtcgctagtcaagccaccgttcacaatgagattcggggctggaattgccaagactacgtacttgatcttcttgaggcactagaaaaagaagggatagtgaacggcaaggacgcaggctacaagaagcagaaaggtttacttcatgggaagcaggaagggctggcataggacgtgttctcctttctgatttgtgataatttgtgccctgttatccttattagatcagtctcttcagtcaaccatggcaaggcgcttgggaggtctgtggaaaggtaccaatgagtgtcaaaatgatgaatgccttgtccaaaggcatcaccatagcaaaagagctcagtggcctgagctttctggaactcaacatagcagcaacatgtgaagctcattaactctattctgatagttgatgacccctgtggtacgtcggtttttactctaatattaggacagacaatatcatggtgtaacaagatccctgtattaatttccgctaaattgttgctagaaatatgactgggagaaaaatagcaattgagtgactgaatcaatgtcctcattcaattttagttccgcagtttgcaaatcaagatgaaaaccctaacgccagccgatgtatcgttgtaaaccgagaaaaagaaagccgcccagcgccaacaccgtggaatagtaatgagtcttcgacgaccgctcagtcatgtctgtggtcttcatgactatcagccagcatctggaagcccttcaccagccccattgcagaaccagcggcgataccgccgactagtaccatttgtatacctccaatgacacccttgcggatatttcgacgaccgcgccagccactaacaaagcatgtctttacatagccgaagataaacagtgcaatgaccatggtagcaatggaccagcgcagggcgatgaaggcttcatggggtccgacgaaaaagtatggtatgagaggaataaatccaccgataaagtatcccatggcaattgtaaaggcgcaaacgatagctcgagagcccgagggctcgggcagagtgtggtggaagttcatgagaaaggatggaagcatgggagagtgagaaagatgatttttgagttgtgcaaccagttcagatggcaactcgtagggctcaaaaatgtcggagatggtgtcagatacagacgcgggatccgtcaaagtctgcgtctccgtttctttcaatgtagctttgtatgactccctaggaagatgtcagctgtcaaacctccaatagtttccctagtatattttcataggaggtaggctttgaggattcaggcagacttactcctcgcttttagcacctagatacccaccgagtcccatcgatatcgctcctgcgatgagctctgcgagtccaccgaaaacaacgattttggtatcgcccaacgcagagagtccagccgttagggcgaaaggcacagtcatgccgtcggaaagaccgatgatggcatcggacacggtgcgaccgtcgaggatacgagacgaccttcgctccgggtcattgtgacggtgtgtgttgttccctgcctcgatatccggtcgaagttgagcacgagggtccttttcatcttccgaagaagctctgcgatcgggaaggggcatataactcgacatggcgccgaatagggaactgattaacacggtgaggtcggagggattgaggactgaaatgaaaccttgcagtatcccttgaagaagacctgggaatgtttgtttaagtgaaagcgagggatacagcgcgattagagaaccagccagttagagcacgcgatgcaatcatgaggcttgccatgcttgcaacctcatatattgccagagaagtgatcagctcccaccgttgaccacagcctatcgagtgacacaggaagacaacgtgcttggcgttcccctcatggccagggcacgtgcaacgctgattcgaggaggttcggctttggagtggggccatgtgggaccgtgaaagggactcccgctgcttaacttggggtgtgggaccaatcaaaaactaccatttctaatccagacccctttcgtccatggactccgcacgggctcacgtgtgaatataaactatacccattgccagccctaagaggttacggtcggatattgcgagacattctgaggttagtggcaatatcgcttagacttcgcagtctggaagagttttcaccgcacgtgggctactgggcatggaatatcatctcaatctaaataaaacagggttgaaatgaagtccgatgatgttattcttgaatccacgaggaacattgatatccagctgagcatgactttcacctctgagccctctgactctgtggcaggtgatagtgtacgtagatgtagaagacataaggtagttgtaagcatatttcctttcttcacttcttcacttttcttttgcttcttcgcacgcttcacgaaggagctcacagtctcgcgttgaacaaaagcaaagatgattttctactggggcttcattattctcatggctttggccagtcttacatccactcatccaactgggaatactcaggtgtggggccagctgcgagagaacgtgagtggatcgcacagcatataaccccaaaggaccacatggcttacaagagcacttccagatcaagcatatcatctatctgactcttgaaaaccactcatttgacaacatcgctggctattgggacttccatccagaaattgacaatttgcgcaatctcaccttctgcaatgactacaccaaccccaattggacagtctacggggagccactagcaatctgcgctgaaccggatgcaaccgaggtgccgctaaaagacccggaccacaacttcggcggagtcacctacgaaatcttccgccagtggaacccgaccaaagaggatgtccctaatatggcaggttttatcgagcgccaatcggagaagtacaatgctacccctggagattcggcattcgtgatcaaggccttgaaccggaagaagacagccactctggtggagctggcaagcaattttgccttttttgattcatatgtgggttcttcagtctacacttggctacgatatgtattattgcagaaaactgactgtcgactctaccttgcagttcgccgagcacccgggtcctactaaccctaatcgacaattcgcaacctcgggctcatcctgtggttttgtcgataacaccgatcagtccgctgggttctggaacaatgtgactgggactacttgtgcggtctcgatctttgaatcgctcagcaagaaaaatatcagctggaagaatgtgagaaaagtcttgttcctttgtactgacaactggctaaacatttctatgtagtactacgagaccgacattgtcgatggattcatgtataaagtcagtactttttgtactccaattgccagatcagttactaacgataatatcaagtgggtgcaagacaatgcaatggaccgtctcgtccatgcgacagagctgtatcatgatctagaagccggcactttgcctgaattctcctacctaaacccggagtgctgtacagttgactcaatgcaccctaccagcagtatggcagcaggggagcagatggtcaagcacttatatgatgccctgcgtcgctccaagtactgggacaatgcgttggttccgttatcctcatgttgagtgcggtaatactaaccctgaaatatagtgttttgatcatcaattttgatgagcacggtggattcgctgaccatgtccccacgccagtcaatgtgcctcaacccgaagacggcatcatcttcaatggcacgtcatcaaaccacaattttacgtatgactttacacgtctaggagtccggtatgcattctcatcccaatttcagctttaccgtatgaatattcggcttaccttctcatcatagtgtccctgccttcataatctcaccttgggtgcccgccaaccttctcatccacgatcaaggcactatgtatgccgacgattcggcctacacccacagctcaatcctacattttttgcaggagttgtgggggcttgagggcttaaacaacagagttcagtgggccaagacattcgagacggcttttactaacaagcggcgagacgatacgcccaagacgttggttaaaccgacctggtatggtggtagtgggcagccagaaccggaaccgttcttctttttgaaccaggatgagagctactatgcacgtcgcaaggcccaggctaaggcataatggatgaaagtggagagttgctatattgatagtgcaactacggtggaataccgagcaaatccttgagatttcgggctcgatgcgggaatctctcgttttatgatatcaggtagtctaatggagtggaacgatacctacccagtacacttattcacagggtcatgataatgcaatccagtcgattgacaccgactcaacgcttaaattgtcaacatgtagtacactgaacaacttaaaccagaggcgatctcaaagcaaagtcgagttgagagccccgtattgatttaggaagcataatctggagtatatggcgcatagtgatcgcaaatttgaatggaaagatcgtatatcaggactggcattgaccgagacgatagaaagcccagaactactatcactagtactataccagcatcgacatgtctctacaatttagatgacatacataagcggcggggcaccaagagggtggatccactctgatcttcgatcgggtaactttttgtggaaaggtggccgtttcagccttgaaagtggtcatattagggcatcaattaaataacttcttagattctcggtgtagatccacgagcggataagtgttcattgcgaaacctcattgcgaaacttggtgcagaatgaagcagtccggtgaaccagaaacataaccaagaaaatcatgcaggtccaacatattacttgcgtttctcagcaaccttctgctccgacgaagacgagccagccatatcccacagtcggctcttgtaagcggggaaggaagtgtggttccacatgttgaataggacactatggggaaaatatcgggtcagtcgtcacgcacaagcaagggcgggaaaaataacacagcaagacgaaacgcacctctgggtctggtccttgtaggcctcatctttgacctcccttacttgcactttcatgccgtccttggtgaaagctatattcttgcgctccatcttttcgcgcgtatttttgcctacatcctgcatgatgctgtagacgacaaatccgaccgcggcgatgatgccaacaaagacgaggagcaggatgaggggaatgatattgcgggcgcccatggtggggtttttttatcggtggtaccggagggtagtccagggaatttttggaagaaaaacgaggcgataggtggaattaaaagatgagagcgggcgggggaaaaaacaataggctagtatatgccaagaacgggtttcttgtcgaaaatagttgcagccttgggtctttttctgggcactgttgctgcctggagtggatctggatgtttgttgcacaagaatgctatttgaattccagcgggacaaggctcaatatgagagtcagggggttgagaccttgcaaggttgtttcaacggttggagtacacaatgacgtctggtttgaggggaaatggcacgcgtcgtggctgtgtcagattgcgtggctttcccgttagccacttcagttatttttatcgggaggctccggcccggtcccgggggcatttttgaggttaattttaggctggcatctctaactagatgcactccgtgcggagtacatacacttggacttagtctactttgatgggacgggtttgtacttgtcactagtatgaagatcacctctatcccgacatgaactaaagcaccccactacctaaaacaggatgatcgatctcgatctcatttgcgtcatcatgatagaactccaaactcaacgtaactaagcggtgaattctctatctggggaagctcatttcttcgagaaatctgtctggatgaaggtcgggacatttctctacaaattctagttcatacacctagcagcttagctaaatccgacacgatggccgacatccctttcattccgatcttccccatctgcttccaatgcggcactgatcagaacccatgtcactgtaaagtggttggcccgacactcggtaagttcggttccttatgcagtgtgaatggctgaaaaatgaacccatgcctgacgaaatggacagggtttttcactaccgttgtgtcagcggtaagtaaatatagtatcttctcgagcaataacataaagactctcttgcttgaatccaggctcatgacaacccttttctaggtcttctgctatccactatcgatcttttgtggctgcggcttcactcaaactggaaaggagtatgtcccgctgtcctgctacttcttgatatctagactaacaaatagtagtatgctgggataccctgtcaagttaaatcagaagatcagtaatgccattccattctgatattgcgagctaggcgcttgagatatacttgagggcctttttattgtaccttaaccttaacctttaatcattatctctcttttttccccatgcgtttaataaagcaaagtacttccgcccatctttcaagaaattgtaatttcttcgtagagtcgcaggggataaatgctcgagagcttctggtgacattgcgtttggatattaaaacctaaactagcatatactgtaagaaagagaacccaatgcgccaaattgaacacccgtctttctccatgacatgtattcccaagactacttaggtggaagtcttgttaggagcaggcagataacccgcagagtattcttcggcttcatcatagtcttgcaaatccagtcttttcaaggctccctcttccaacagatccgccacactagtcagagccaaaagctgggatccaaacccaggctgctcaaaccaaggcgaaatgggccccaaaaggacatcaaattccttggtcacctggtagacatggtagttgtacgggaagctgctgttggttggcgcgaacagattggatggtggcagggatcgctcgatatatggagctccaagaggtgccaagaactttccaaattcagacccgaatctatcaagcttctggcccacgcggagtgtaaaattgccaagaatagacgcattcgtggatgtttgggcaaatccatcgctgtctggatagatccagtaagccgtggggtcggaagcgttcacggtccatttctccaggaactcaattgggcagagctcgccgaagcgggcgtatgtcttgagctcattggagagagggaaatatctggggaggactttcggaccaagtcgtgggtcaccacaaacagcagtagagttcacgtgggtcactcctttacaggggtcggggtaacatctttttgggtaatccggctcctaagaagtatgagcatttgaaacttatatggcctggtaccataaaaggggtcttgggaccactgaccttgtttgtagcgtgcctgttaggagtgatgaaagaagaagcttgtgctagagcaaccgaaagaagcacggatatagttgagagatgcatcatgaattatcctgataatttctctctgtgggttcaccgaagaaaggaaacagagccattaatatactagaacggccaacggagcattgaccttccaatctcgcgatctacagcgctatccaaattctgcgcctaagctatgcaagcagatgggtctgtcctacagtttttctcccgggggttagccacgcgccttttcgagctcgcttcattccaatcggcggcatttttccccttgctactccaccctattcttacccgatttgtaggtcgtactctgtactctgtacaacatacaaggtcgaatggaatagcctacaatgtggtgaaggtttcgcactctccatgcctcgcaactcatccgacccggaaagatcacagatattctcagagtaccgcagagtacataatttattgacaatatgagatcggaatgccagatccaatcgcttatttgagagcaaaattcaattatgctgagagttttactctatggaccattcaaagagccctagaaatatgtggcgtttgaaaaagccagctgtgttagctcttaatccacaaaaatgcagatgcgcatagcttcctatttaggaaaatgagaagcaactgtacccgtacggaagcactccatacctgcaggcgcattaatttgctcaatactcttcccaacatctagcaagaattattgtgcacgttatcattacaattcatttgattgttattcccctgtcagctagcattggttcggtttatttcacttggttatttctatttgatttcaaaccgggcgaataaggagctaaaggaaaaagtaatataagacaatcaatagttcgtgatctacgtgcatgagcatgaatctattcggccatgagattcgagatccacaccttggcttgcaaaagacgattatttccttcacaggctgaaatctgagatcgaggactccgtacaaagtagaacttagccaataactgcatcatacagagtggatccaacagtagtcgcgtgaccaggtacaattcagggacagaacactcctaatcgttaggagagatggggaattatctatcatcaaccttgcataggcaactggatgtgtcgaattgacgcatcagtgaccatattggttagcattaagctgcaagcagatgtccaaacttgtacgagtagtactccgtaaaggctgaatctatttagccaaaggattagacccgctacagggccacttattttctcccctgatgtaggcaggtgggctgcgttaattaaagatcggaaagatcatagaactatcgatcgagactactccgcacaaaatacagttattcctatgctaagcgatattgcttggtagtacctacaaaacccccttccatttcattacaacaatcgacatcttccctcgtcccttgtttgggcttgccggagcccagtctttgaatgtaccaacctcctcaaagttgttcttctcaaataccttcatgctccctatgttcccaacaaaaaagctgcctctaagaagatgaaggttcatccgagggatagcccagtcttgaatgacagttctaacagcaacactcataattcctcggctgtgttgagtaggagaaagatagtctgttaatattattagcaattgacctcgagtctcactaaggtgcccatacatacatcctataccccagacgatatccttgtgccccacaggcaaatcattattctgatcctgtgccagcacaatctccgagctattgggttgcagctcatagaaagcataccgcatcagtgaaatgtctccgatcaagacatcttgaagcggagcgccggtcgcagggtctctttctgttactttgcggatacaaatgaaagggcatttatcaaaaaactccagctcctctggggaatttgaaccgtcgccctgctgactttgcgtttcgaattctctttgcagagtagacaggacatcctcgttttctgctactttcgtcttgacccagtctatgccgtgctcaggcagaaaagggtagggtggcccctgtagccaggagtacacccgtgaatcattgaggatttcggtcattgcagcagatgcctcctcgatctggtattcacggtgtggagtgatgatgatgtttgtacatggtgctgggagttggagatagggctctttagtgagcggattaaagtggacaaccattttgccaaaagccaacctaagtgcaaggcttccaagtggaacaactgcacgctttatgtatgattgtatttcaactgcacaaggctcgaagtcttcgtgagtcactcggcaaatgagagctaaccaattgtggcaacactacagttagcttgatattacccctatatataattttttcctccaacttcttggctaattactgactattgattctttgccgttcataaagtccgagttcgaaggcagcttattcagaccttctatcctcggacctgacaatgagaacatcccgcaggaactgcatattaggaatccgaatacaagcagcccagaatagaacccggcgatgcaagtatcgctagctagctggaatcttgaggcagctaaagtatacaatatctggatgcatttgtatgtggatcatgtcaatttgacagtccgctgagaaggcaagaaaaacgcttcgttatgttctattatacaaggaccccaccaagtgccaccaccatctcgaaatggcattaaccttccggggtatatgaatgttaatttaccggcactcgactggtcaattgctccagacgtcctgccaaagctcgatgtttgcgcatgacctcctcccattcataggccatatcttcggtatcttcctccccgcctagctcggtcaaaatcatgccaaagtcaccgcctagccgaccaagacttgcggcacagtaaagaagctgggtgagaagactttcccttgaactccgatcgcggacgttggggagatatgagcgcattgtatccgtgagcaattgcacgagatgcattgggaaagtagccaaagctggggggagacgttgcaagggatcatctgagtgtgctggctttgacttggccttggagtgaccgtctgcacctcgtaaacctgagatggcaaactcggattcggattgctcggagttaaaaatattcttgtataacgagacaattgcaaagctctgctcacggaagatctcaatgtatctttttaagtagcggtcggtctgctgaccaccggaccacgagttcgtgtctgatttgtccttgccagcgagtctccgttgggtttcttggtctgcgagctcgcgaaggggatccagggcttcaagcgtcgataccaaatgcgctagtctacagaccaggaagatagcaccaagagcgccttctcctgtcccgactgccccatcactctgaatcatatctagatccggggccactcgccgcagccaacccacagttcggataccagctgctagccgtaggttctgggttcggagccccgtaatcagattactggtcatgtccttcatagcatcctccgcctgggatgcaacgtcttgaatcaatggtgattcggggtataatgtttgtagtcgcttgatatgtgcatgcaggtcaagtgcagaggagtaggttgtagaggagacaccggtaccggagttgactgaggccgcggagacggctttggacagcagacttggtagttccaagatatctgacaatcgatcgacgttgcgagagagctgcatcgctttcttgcgtcgttctagggcggcattgtctgtgattttactgtatttggtggagaacccaacggcctcctcgtcgagtttggggatagcatcgcgtagctgttgcgcctcacgggtcaactgtgggacagatgtacatagtgtggacaaattatcggcagaggtgacaaatgcccggtgggaacggttcgatagggcttgaagggacagaagggtcgagtgggaggattgggcgagcgatgggggttctgtggtctggagagcttcgagcgacaaggttgagaggcgagtgagatatttgtccgtagttacatcgtgcgatttggttgcatctagatgtggagcgagtagctccagcaaatcggccatggcgagttgatgctattcgtaagatgcgtaaaagaggagcgctgaacggtccacggatcacccgcccgttggcccgtgcgggtcagttgtatccccgactggaatgaactttttctttgctttttcgatcctctctctctctgttttagatagacagatagttaggtcatcgttgttctcttctttccttctctttttccatcgttgtccttgtggctgcaaataggatacttctactagcccctcccccgcattcgaaacccattacgttccccatgacccttccaccatggggaagccacgggtaagtctctatttctgagtgattgacatatgtcttggcttaaactgacagtttcctacgtacagatgatcattttagtgcgccatgcacagtcagaaggcaataaaaaccgcgatattcatcaaactactccagaccaccgtgtgaagctcactgctgaaggatatcgacaagccgatgatgcaggccatcgactacgtgaccttctccaacccgacgatacacttcacttctttacttccccatatcggcggacaagagagactaccgagggaattattgaatccctaacctctgatacacccgctccttcacctttccggaaagacacaatcaaggtttatgaagaacctcggctgcgggaacaagattttggtaatttccagccatgttccacggagatggagcgcatgtggatggagcgggcagattacggtcatttcttctaccggattcccaatggtgaatccgcagcagatgcctatgatcgagttagtgggtttaacgagtccctctggcgccagtttggcgaggatgactttgccagtgtctgtgttcttgttacgcacggcctcatggcacgagtatttctcatgaagtggtatcattggagtgtggaatattttgaggaccttcgcaacatcaatcattgcgagttcctagtattgaccctcaatcccgaaaacgggaaatacacactacagaacaagcttcgtacctggtcagatcttcgaaaagaccgagatcgtgaaaatgcatcgaaaggtcaggtccctgcgcccatcccacctctcggtcacacagataataccccaactcggcgcaagtggggaggctgccccgacggctgtaatcacggcatgactacagagggaagacaatcgttgcgagtgaatctattgaattccagctatgcccaaccaaagcatgccgatgaccatgtaggcggctttggctccaaacttcacaagtctatatccatcgacgaggtggtatcgttctcagaagacaatttcgcccaggatgataccagtcgaaaccccagcgttcatcgcgtctccaatccgcagcatacacttcgcgacaatgacaacagagacaccacaaagcagtacgattcaggctccgaagcccgaccaaacgtgaattcattgcctccaaaacgtccaaacttgcacggactgaaccgaaatagccaagaccatacacccacatcatctgcatcatcatcggcgcacctaaagtatgcccttctccaccttggcggccgtgacggtggaggctccatgagcggagcgaacagcctcgccccatccgatgatgaaagtgacgatcatgctcaccgtcgcgttgtaccaacttctcccggcatcgccactggcaatttgtcccatatgaaccagcaaaatttcgaattcccgtccaacgagcagactcaacagcgtggtccctctcaggagttcgaagatgacggcgatgacgaaatgagcggcaatgccaccgagaaatcgaagaaacctcgtctgcaccatccccatcaataccatcactattatcaccaccatgtttcttcttccaccgaccaacccgagcaccgcatggccaatatcctcggcgacggagacgagtcatccaactcggaatcacaggcgcgaagaccagaaagttcttcatcggattcctcaactcatatccacatcgaggaattatcattagaagagcagcaaaagcaaaatcaaagtatagaagggagcgtttactaaatctgttccagttgctttcgtcgatgccttggctgcacttctccttatttcctgtctctttcttttctacatctacgcttacgacccgtgacgactgtctggattaccctctagtacaactgcatttgacctacatcttacttcagaatgatggcccttttcggcgttaaatcaatattaaattccgtcataaaagtatatattacgagacctgactcagaattcattaaatgtcccaaaagagcctaagaggttgccaaatctagcagtggttatagagtagtggaggctcaccgttcaaacagaaggtacgagggggaaatccatacgagtccgagaacaaaacaccaaagtttggtagtcctgacaaagacaatattttgccgctaattagtgaaacatctaaggaactgagcattgacagccatagccacggacgcccgtagccaggtcaacgcatgaccaatggaagcgggacggccccagctcgctggcagtgccgaatggcaaagagcagaaaaattcagctatactacagttgtcaaatcgcgggaactcactagactctcaaaatgacatcagacaggagatgtatcaagggtaccgaaatcccaagaccaatcgtatgccatctgtgtcacaagcgaggggagagagaggtgggtgggaatgatgggatacatcatgcagcttagaaggctcggaaaaaatccttgaattgttgatctcattgattggagaagaacggctcggtagagcaagataaaaacaaatcgaaggaatcgaaagaagaaaaaaaaaaaaaaaaaggaatgaaaattgaaaatttgagttgagaagtgaagaaacacgattaacgtcggggcactgcacgtagcgtggcgaatgggaataatgtaccgaaatgaaatggaagtgaaaaagaagaaaaaagcactctataggtaatcaccgcgagacacaaatgccaagcataaaacaaaaggaccaaggatatgaaccgaagtcgtgggtaataaacaaagaagtcagattttggggattcgtgatagtcgtgactgcggccccggcaacctttggagggaaaaatgaaagacccaacaatgaggttagaagtaagactcaatgaaatcaaagtgataccaatataacaagttgagtcaatattctgcattgtgggcttgccgggagcatgccaatgtccgctgtgggagcgtttttcctcttttttttccattttcgagtttttttttcgctttgccaaacgagaaccagcggacgcagaacagaaatactttttgggacgcggtaggccaagtgctcagaagtaagtgaaagttgaacgaagcaaaaggtcgaaaggcgcaagattgaaaacaattcaagcaaaagaagaaacggtatcggaataaatcccatgcgagtcgcccaaactaacggtgaaagaagtctagagttgtagcaagaaggaattatgcggcgagacttgtgatcttgagccgtcgacacagtctgttccatccgaggtcgtgggcagaacttgccaagtatcaccaactaggttgcaatcatcggctgatgcatagagggaaatgcgttgttgcacatgtagtgctcgagatgcttggcacagtaggtgcagcagcacgacgaaccatgacccgtccagagactctgtgcgaatggcaaaccgtacgccggagtgtgatgataggacggaggctgggagcgaggtgcagggtgaaccatgtactgtgagggtgcgttccagccccgcgagtagggcggaggcggaggcgggttagcgtaaccccaaggaccaaccgagtagtagtcgggggttgtgggcccgctggaaagggcagagggaggcgagtactcggacgcggtcgggttgagccacgagttctcaatttgggagctccgctggtactgcggcgggatagggccttcgggggacataaggggcttgctaatagcctggccgcgggccacgttggtctcgagaggtgccagagtctggcgagagtcctgagtccgagctgttgccttgacccgccaggtgtcccagtgcgcgcgccacgaggcgaaaccatcctgcttgtcgtagatgcggtcgtgaatcttccagtcaaaggcaaaaagccattccaattccatgtggttcaactcagcaacggggatgttgctaacctcagcccaggatttgttctggaaggtattgtcatcaaggaacttgctgcccaacagaagagccacagtcaacatgcggtagacttggctactgtctgccttggtgaaggcgcgtttggctgacaccaggcgcatacggctggccaggtagaaaagaccgagcaggatggtagaacttgggaggcgtgtcgaggacaaaatctgaaagacgtatttccgaaactggggtggaaccgaagatcctgggtagatgcttcgcacgaggtcaatatctgcaatggtgatgttggtctcgaacaaatcatacattccctgagccatttctgccacaaagtcggacatgcgatccatctcataatccaggtgagctgcgacacctccagttgctttctcctccttgcggggttgttcgagctgctgttgcatcggggcggcttcctgtcgacggtagtgaggcggcattgtagcatccatggggggaagctggacgttgctgcggattgagggcaatccagtgccaaccatggggttgaacatgggctgctggttcatcatgtgatgatcgcgagcagtgttcatcggatgggcggactggtggagattcatcgaagtgggtttggcgtaacacagagactgcgagtattgttcgatgaattcattgccgctttggtggtagcgaggagggaatcctgcgtgaccaactgggtagaatgatgggtcttccatacgaccaccgttgacatggggaggcgtaggcaggccatggtggcctgggacgaagaaggacggcatcttgagagggggaagggcggttaccagttcaggacggggagctagacgtattctgttgccagggaagatgatgaatcagcataaaaggcctccggggtaggcaaaagcctgatggaccgagagacaagagttaaagaaacaaggagacgaaccgtctactccaccagatcctgatcctgggggggaggaagaggagaagagcggtgctcggcgagcggatcgctctgtcgtattcctagggggcagtctctagttgaatgacatcgaggtgcgttcaatgatccaacagacaaatgacaagtaaatgggaattggaaggagtgtggtgaacggtgaacaatgacacagtcctcgcttgaagtgcctcagtgacgcagcttgtgggggagggtggtagatcacaatccagtcaattcgaagggctttgagaggcgaataaccaggtcgaagcgaagcggaagagcccacgtagaattgtgaaccgaacgcgctgggagaaggaagagcaccggtggaagaaaactaaatttcccacgcgtagacgcaaacctcacagaatgaggtgatcaacgacacttagtgaaaagctcgttgacacgggagaagattgatacaaaaaacggggttgagaaggaggatgaagagaagaaaagttgtataggggcgttgtgggaaaaggccgttgggttgccccggtaattttacatgtatttggtatacagggaaggagtcactcggcccacatatggaaattctaaatttaaaaagctcaattgctgtttcacacatcgtgtctctgctagtatcaggtaaattaggccacctacaaagtatgaatcatgatgcttattggatgtgaatttaacaagatcgtcatttcttattagttttctagactatcccgattttttggattttttactataaaaatctatcctgcgtttcctataagttgaaaacgtgcacagtgcatagtgcaggtattatcatgtaattgtattgtaaggctgttaaagtaaagaaaaaggccctagacccttcaggcaaatccggtgatgcaacgtccgtgtcactggttctcgctggttctgactggtacggagttttgtattgagctttggcagaaaaaaatgaaattcgggcttagtaagctcagtatattccgtcgccttggttggaattcgttttcaagaaatttgaatagtaaagagtaaatactaaatatccccttattaaatcactagcattatcatatctataaaaaaacatctgaacatcaaatgccgcatccctccgtttctgaatctacaaaacccctacgtagtgctacctacggatgtgttcatccggactctgccaacaaaccaactccaattatgtacaactacggagtacaagtaggcactatagtcaaactaacaaaccttacagctgtcgccgggtcattctatccctcgatatgtaatcacacggctcattattccgtacacctaagcaagggcaaccgacaccatgcatctgacaaacactccatctactccgtactccgtacataactagcactccccctacctcttctgggctttgacatgtcagacacagtctaactggccacctagggaggaaccggggctctgactcaccgtggacaactccgccttcagcgaagacctgggtgttgatctctgcagtctgcatcctaatacggagtagcgtcatgctgcatgggcaaatggatatgttggaggtactccgtacatgtacttactcttggaggcaaaacagtgtcttggcaggtatttatctgaggctgacagcccgctatatttatgtgcctatctgcttaaaaggcgcatacatcttctgcgtgccaataaaaagccccatatatatggaactcatttctccaagaggggtctagaaatacattattaatccttaaatacttaaaatacttaactataacaggcatcgaaaattgcgcgtattaatgaattccagaaagaaaaaaggaagcccctcggacctcgtgccttgccatgctgatgcagttcctccgattctttcaaggtaccatatagtacatgcctatatacaccttgcaccacatgtgatggttctaaccaacatagacaataaatacatcaataaatggacctacagaaaaaaaggaaaaggaaaaaaacaggataacaggaccaacgatgcccgaccggctacattcggcagcttttcccctagaataaaacatctccatatttcctggctgcactatatgattccatttcgccgtaatttaaggaaaaaatcggaaaactcaagcacccctcctttctcctcagggcgggggaggcaaataagagggcacaagtacgtaggtacgcatgttgtacggagtaactataaggttgatagttaatcaatgatctcgaaagcactgtcacatttgtcatgatggtatgattcttcgcaggttgtttcttacaatttctgttttgggttccttatatatgccggtattgtatatggctgaccggtctattctatgctttggtgagcgtttgggcttttatgtcaggtgcctaggtcatgcatgcctggataaaaagaacaatttactacactgcctctgaatgggctgtgacaagcctgccaatgaagaaaacactgaaaggcaaccaattagaaaggcgtatacaaaggccttttgagcaaaagcagaggaatatcgttaatattcaaagcatgttgcaaaacaaagcttcggactttgaaagctcaatcgaccttctaaaggcaaaccataagctttactagatatgttatataactctagactcggtccttaggaaaatgccaggatccattattatccatatcaaaaatatacagaaaagatatgtactcaaaggaaaagtgcgacagcagcgataacaccaagagcagacaaggcgccggaaacagtcgaggacgaagcacggttgaacacaggtgatgcacttgctgagctgctgctttctgtagtagaacccgaacccgtgcttgcacctgcgcctgtgcctgtggcagcagtaggagaagaggccgcggcgggggaaaccttggctgtggctgagtggattccggcggagattgaaggtgtggctgagctgatgcgtgtgagtgtgatgccgggcagattagaggggtggccggtattgctaccagcggagatatcagagccagagccagagccagagccggtcgaatcttcatcttcaccttcaccttggttcgccgatactccggaaccaggtccactttcaccaacgcgagaaacactagtctcactgatcacacctccctcggtagtagcggtgccagtgacagtgacaatagagtaatcggtcgaaatccttgtctcactactaacaacagcagtcgccgtctgcacaggaacagtcgatgtatacactgcgccagatgccgtggtggtcacagcggtgttgattgggaccaaagtggtaccggcaacgatagtctcagtagtgacgtgtgttgtctggtcgcgggctgggcagtcagtcactgtttccgggcattgggttagagtgacagttctggttgagaggattgttgagattgtgtagtcattgtcactgccagataggctagtagggctggattcctcggaagtagcggtgcctgtgatggtgacaatagagtatgcggttgaagtctttgtgtcactgctaagaacagcagttgccgtctgtacaggaacagtcgatgtatgcactgcaccaggtgtcgtggtggccacggcggtgttgatcgggaccgaggtggtaccggcaacgatggtctctgtcgtgacgtgtgttgtctggtcacgggctgggcagtcagtcactgtctccgggcattgggttagagtgacagttctggttgagaggattgttgagattgtgtagtcattgccactgccagatgggccggtagggctagatccatcggtggtggtcgttgcatctccaacagggcagacggtggtcgagacgatgatagtctcggttgtaatgtgagttgttttgtcagtggctgggcagttggtgatagttgagggacaggctgtgatagtcgcagtgcgagtggtgaagatagtagaggttgtcatatccggcgtagaagtttcagctggggaagagctagtgggcttcacagatgcaacggttgtcggcgccgtggactctgaaaattctggtgttcccggtgtcgaagctgaagactcgatgacactgctggaagcggggtttacaggtccggtgatagtggttgttgaatgtggcgtaggagttccagctggggaagagctagctggcttcacggaggcagctgttgtcggtgcggtggactgggaaaatgccggtgctccaggggttgaggctgagggcttgatggcaccactagaagcagtgataggtgttgtcaaggtgatagggcctacagtgctacttggtgatactgaggagagcgatgaagatcccgatccctcggagctagaatggccagatggggagacagaagaggcgagcggagtgctggtagccacaggcgagcccgatggggtcttggtagggaccgagacgctggtcgaggtgaatgaaccacatctcttctcgaacgagaagttgttcacatccactgttgcgcccaatatcgtggcaccagggcaactaattaggatgagcatgtcggcttccgagctaacagccgtccattgcttggtgatagtctgccaggaaccggctgtaagagtgctaacgccgacatttgcaccattgagtacaagatccacggtacaagagccagctgtcaggcggaaatcgaaagagacagagtaagtctcttccgcaacggcgccagtaacggtctggatcaacagtgcctgcgattggatagcttcggcactcagatgcctatcacaaaatatgagtcagttcatttatactctgcaaggaactttggtctgtatgtatgattaggtaggtacgaacaagtatccatcgacaacagcaccggccgtgggcgggaggacagtccacacactgtcatcgagatcgatagtctcgaaagccacatcctcaatcaagttttcagaagcacaacccaagagcggagctaaagagggaatagtttgactaggcgcggtgatagtgagtgcaacagctggaagaacgtggacaagccacatcaagcagctttggaccatcatttttgtatagaatctagccaatgtaaacgaatggactggtgactaatcaccacaaaggagcaaaagaatgtttagatgagcaagtgagcgagtaagtgaatgagaggatatcgtgggcttttagcccccggatggctacatagtaatctccccaggtctgtggcgttactgctccacttggaaaacatggcaatttgaagcgaggattgtctcgctcaagacaaggcaattggttcctgcatgaattagactgacttgattaagggaccaggcacacatcaaatgagtaactagaatcgtgttattcttccacttagggcttgggaaaccttgtaaaatgattaccggcacctggcatggcttgctgtcccttgctgtctaagagtctcgggaagattgggcttattgtagacgccgtatttctcactttattgctgaaatcacaagagattcatgaaataactgatatcaggggtatctacgttttgatgtcccctccgttcggcttataccagtggcatgggcctttcaatagcctggtctatttttgtaaatgtgcgctatggcccatcagtaaccgggaaatctaagacatgccataaagtttaaagacaatgcattgcacaagaaaaagaagatctcagagttataggctgtcaacaaccaaaaaatcctccatgacagtctggttgtacctgtatatgctatctagccccaaaacgcccaggaaacacaacaggtcatatggaaagcgaatgaagccgatgtacctaatcacacaaaatgcacccgaataacaaaagacaagaaaatgctaagtgagaaaaatgaaagcgctgaagtcatcacatcatatataacatacctaccctacgcaagagacgtgggcaagaaacaaacgaagaacaaaagatacgcatataaacagccacgatcaaacagtgccgtagcggcggcgctctgcgcccaacaaagcctgtccctcttgagaaaccgaagattcccttgagtccctccggggcgaagcagaggggatccagcctcgcatccagccgtgaacatgcctccagcgactgcgaccgcgctttgggtcatccccatcgccactgatgaaactctcgtcatcctcgtgctctggaccatcgccatacatgagaaactgaacacccatgaacccgtccagccccaacacaccgaatgcacccaagaagaacggcgtagcgcgtccaatccattccaatctgttattgccgtggttgtcagcccagccgccgccgccatatggggagaaatcggaccaagcattcgggttggtgagcatcgagctggagtagaacaggttcccacagaatgcggccatgaagagcagtggggaaagaccttcagtgctcttgcgctggtagtttttgtatagctgtggagggcgtgagccgagatacaggattgttgacatccaagagaagacgcggccgatgatctcgacgatggtctcccgcggtgcttccgaaatgaacgtgtcggacttgtcggtgggggcagcgtttgcgagtacggcacaaaggagtgatgccatgagcatcgtccggggcagtgcgaatggcgggctctgcatgctactgcccaaccttacagatcgacgcgatgagctcaatttctcgtttgagtatgacgctgttggcacatgggtcgagtcgagtgctgacccggcctggaagcccccatccttggcctcggggtgcttgttgttcatgttgacgggagccggggtctgattgtctgagtcgtggcctggaggaggcacgccttgaatgatgtttcgacgagccgagtcatgcgaatgtgacaagtcgtcatacgaatcattctggcgaggtttgtaatgagtgtaccagaaaaactggaataccagagcgatatcaacgaagacgtaataactggcaatcacgacctgccaccctgcctgtcgggtatatagcgctccaacgaggttgctcgcgtcaccaaggcaccagattaccaagaaaaatatcgataagcctgacgtcgactgcacttggtagttcttataaatctggggtagttgtgcgaaaagccatgagactatgctgagggtcccaaggacggaagagatcgccgcgagaggagtggggatgcagatgtggagatgcgaggagacggcggtcaggaagggcgaggtcggttcacagtggtcaggaagggtcccagagaggaggtactgtaatagtggaggagacatggtctgacgatcagggtgtctttgatagatccggtgacttggtacagcctcgagtagtgactcgtgtaggaccgtgtggcattcaaagtatggggtaagggcgataagcggatccgatgtgaacgagaagaagagaggatgtatgctctaagtctagtagagctaatagaccgagtaagttggaaggagaaggtattaagtaagtgaacgaagcaggaactggagagaacagatcttggggtcattctggagtgtcacgagagctgaatcgattgccttatcgagctcatcggcgcagatcggatgactcatgcgataagcataaaatgggcgtatcagggcttctccgagcttggaaatgcagcaccctgcatttaggtaacacatcattatgttgtacgatgtgagccatgatagttagttatcataaggatcgattagtcaaatgttctatacctaactaggtacctacatgtcggtacgtaaggtaccatctaaactcccaagatcttacatcccataaataacttggaagtggcaacgacacatctcaaagtcatggataagaagctagaattcaattaaaataacgtatataaccgtgctaagcgcccgacacaacatcttcccaattaggtctcttttgtatggcttactctacttaggcactatatgaattttctcaaccctcggactagctaaagtaagagaaagagcacgaatatataatgataaatttagcttcgttgatttaatgctagcattaattcccgatatccaatgagaaagaagaatagtatttaacaaagacactatacaaaggttctgcggtggcaatttcggattcggattctcatagcacgtagatcactcggtccattggaggggtaggatgtgagtggattttactgtggttgaatgcccatttgagcacacttttactgccttgatgctcggtataccgatcaagtactgtaatggtgcagagggcatgtcagtcgtcgccctcgggggcctctgcctccacgagccatgttcgttgatgatgcaattcatgttttcaatgacttgcaggtttcatagcaagaattgaaatgttaaaatgagattatttcctaaacgaaagtgagggtagataggtcgactaaggtgtagtgtgatatgaaggtcaattgaaacttcatgaaatgagagaactttgatagaagttttcaaatgatcattaaatttggtgtaatgcttgtttataagacaacaacctagacgctgctccttatatccgaggagatccacgctgctaatctttatacgcttcaatcaactgcggtcgcctgttaatctctagatatcctacataggtaggtccctattatgacgtcgaagcaagtcagtatcagccgctcaactcttcagccagctggaaaaggtcattagcacatgcattgaaaatcctgaagatgctgccacggtcactaagtagaagggcgaagtggagctggcggctatgcacgccactcgcagccattttgatgttgtccaatattcgtcatcgaatttcgtattaatagttctatactatttaaaggaaattgtagaagagcctcgctacctacggcccggccgcacgccccgtatttatagttggtgtgcattaatttactagtgtagtaattcattgggctaactgtgcatgttgtcacacatgaggtaaattaaactctgcttacatcccgacattaattgtgtgatacatgactcgctagctgctatctctataccccggcttttacgcgggctcactcaacgagaggtggctttgctatatgtgtctgacccgcaagtcggaagctggagactcggtggtcccatcttctattttgctggagtcttgttgtcttgttgtactgaactatggtatgatccctcacgaaacttcaaaccagccatgtcatgtgctcattgcccaattatcatgccactccgcactaagcgttcaaatcacgcggccagtgatgtagtaagacgaggtgataggcacgtaaaccccgcaagaccaggaaggttctctggttcgggtaggtcattggacaatggtgttggcggtcgtaccatccgggcgtatgtagaatgaattacatcattacaagcattccccgcattctggggtaatatatatatatataaaaggttgacatctctgaattgatttccaggagtctcacttctacaattcttcatcaattatcacaaatacctcacagattttcaatatggataatatggacaagtacaattctcagtgggtctcgttccacattcgggaccacatcaaagatggcgagatcctggtgcaaaacactgtcattgaagggtatctataattacagagatacaatagatctctactaacactcggcagcgccgagttcaccgaccccaacaaccgacgcaagtcgctcactgaagaggaggttgacgagatcaagatctcccacgatggcgttggcgagatcggcgctagcagccgccgtggtagtgagggccgcctggacttatttcatgacaatgacaagatttgtgagctccactgggaaaaccgaggtggagactacgccaacttggtcgaggtgctggacaaaagcgacaagtacaccatccagcatggaggatggagtgctgaggccggtcccctgggacatgtctttgtcgatgtcgtggagaagaagaaataattacgctccacaggctgcaccaactccctacttgggcgttgaagagcaaagagtgcagtccgtggagtatgagtggcaacatttggcagggaaagttggatgtattctaaagtgtcataaacaaacccaaaaccaccaaaaacaatgcaaaactttgaaaaccagtatcaatttttattccatcccaattctaatacataggtgggtgccaatcaagcaatttcaaagagctgcccaccgagccacgcggggtcagacaacttcattgatgccgaacacgagcagtgccttatcgccgaggggctagttttatggttggattttggttggcttgggctctgaatccttgtctgagtagtttggaaacccacaaggtaccataaagaatcaatccttgaacaggcaactaagactcccttccgcgaaccagtccttatcctttttccagccgtggacgatcaaatctcttccgaccttcaccacctcctcaatttgcttttgagttccccatccagggactctacttccccagcaaatcaggtgcacaccaacgtggatcgcagtgcggaaagccatttcatcatcaagggccccgtatccctctaggaatccttgcataatccacagtccaccgtccacgttcttgaacagctttgtttcgtacaactctgcaatcatttggcccaagtccaatgcccggattccgatatgcgacatttcccaatcgacaatgaacattgtcgtcttggtttgacgagtgagaggctcgtttggaagaagaacactagaaatcacgtcattaacttggctcagttcatgaagtctagatccaatagagcatactttccagtccagaagtcaccgtgaataattccatatccatcatcatgactctgtcgctcaagctccgctgcagcgaggccacggaccttctcgaaaatatcacgatcctcctccagaatactggggaagttttcaatcgtgtccatcagcatagtgtagttcacccagaatttcaaatctttcatgaatttgttctcgccgagaagttttgtagattccatttgctgttcatcggccgtccaattgtgaaacaatctcaaccaggatcccagggcaccgcccaaggctcgccctgaggattcggacaagtcatgcgaaacctctgagagcaggaagttcttcaggtcgattgaatttggaagatcttccaaaacctgggtgtctgtctcctgattaaagtctaataagtgcggtgctttgacacttattttgccattcgtatatattgccaggccatcgagggcttgaagaatggcttcctcaaagtgctaatttgagatcagcatagttcgaagcaggctcattcaattaaaagcaactaacgcatctcttgacatcgattttaaaatctgggttagaggccgagtgatccttggtgtgcttgatgacgattgattgtccagttgaggaaagtctacctcgatagacaaagttggctgtgcccccagacaggcgtgtgagcgaggagcatgcgaaaggagtgagggaaagttgctgggcaatttcatcgcgtgtttgatcctcattgatatttgccatgttgtatggcttctttgcgtaagagtaaaagattgcgtgaaggtgaagggttcaagagtgtttccctctaggcttaaaacgcgctagtacgtatatcgtccccgcattttatctccactggcacacccatattccgcttttatcgccacatgtctcccaggcaaagtctcaccttacaaaaatgcgattacagaatattcaccctaaagtgcaggtcaacaggcattctgaatattcccttgttgatgttatggccttgtcacaccaaaatcgtgggctgcatagcatcagcgatgtctatcataaatttcagcctggtcgagaaggataggagagcccagctctaggctggctagattatgctactcaaaatcttggccaacccttctttcgcaagctagctttgctgcctagtcttatatggaagggaaacgggctccagcgttgcttcctatgaatccgagactgtctacctagatctaaaccagggcatacatatatatgtagaagatcaatactactatcgcttaaaaatggttcgaaaactgccagctattgaatccgtcgctttcatattagcgatatggggtaacaacgccggattaccgttaccaccacagttgcaacattggaaggatagtgtggtgaaatctttgtttttatggaagatagaaaccctcctaagcccatgatagctcagtatctaggcacagtaccgaaaacataattaggagggtatttgtcctttatcggaatggttgaagagaatgatgaaaacaagtgcatcaagataataatgctgtctctaaaccgatagcaagtctcgagcaaagtagagtacatgacttaattccatggcataaggtcggaatcctagcgcgacaaaaaaaaaggaaaaaaagaaacactaggcaaaagaacactgtccgaagtcgagatccgctcagtattcatcctcgtagtaatgtctcgaatggctggtatgatgagagtgcccgctatggccgctatgactactatccctcgaatggctccgatggccatgatggtggtggtgacggctccgatgatcaccgtgatcatgcccatgctcatattcactatcaatgtcacgcctcttgtgatccttcactttgttctctatgaagttcccgagtagcgcaccaccaatcgcacccagcaagccatgttccttcttatggccgagataatagcccgccacgccgccagcgatcgagcccccgagcccacggtccataccccggtcagtgtcggtatctgtatcgaagcgctgttcgccactgcgctgtgaatactctggctctgatgcatagacggcgggagggtggggacttgcggagggtgtgtaccgtggttggctggccggatggttattgctagggctcggtgttagtactatagcttttcacagctgggtatgcatcgcccactcactagtattccgcgttcccggggattctgtcttgcgcatgttggtatcctgtcggaaccactggcccaaggtagtctggctgccctgtcggcgtatagcttctttcggtggaggatccatatggatctggcgcaagttggtatggactttgctgtggagcataggcttggtttgggtttggactgggctggtaaggctctgatccggggttctggtatggcccttggtttccgtaaggctgccggtgaccatataccgggtactgaggctgatcctctgggcgatagtagtcaaccccgctcggggtaggcgttgagtgtgagttgtaagtattgtatggatctcccatggtgatgcgatagatatgttaaggaatcctgtcgcgtcaagaacgggaacacaggaaggttcctatatactccgtacctatgtgccgggtttcctttgccccttccgtattagtactcgcccctcccgccgcttttgctcattgagatcatctcaatcgatcaccgagcctgaccggagtgccccgattcgctcattgagcctcttcggagcctccggagcggaacagtaacctaactaaactaccaatacactagccccactgatcaacaatatttcattttgagcatcgcttatgttgtacgaatctgaatggaaagtgagccatttgtaattgaccaatcggttctcagcgtagttcccaagctttcgggctcaggcttaggaagccgtggcactgaagcgttgtcgtcacagattcattattgttgaagagttgtatatgctggtattgttgtcaattagataaatcaatctttggcctctcgcttcctgagctagaaaggcgtttccgtacctagctcctatttgcacaaagatgggggacatgcaactctactatacagatctaatagattgatactgatccgccacgtgacttcaccgagcagctcactgaaattactcggtgagcctgactctgagcgccctgattaaagcggcggcagctaaaacaggaaagtctcaccttgcagagatagatcagacagatgacttgcgggccctatatgtacatgcgtcatggtgcagctgaccaacccacacgaccctcgccgggacttcggaatgcacctgctctccagtcagatactgatcatttgcttatctgtacacatgtatagtttgaggagtgtgccttctaatgttttttttttctcttcccaggggaaatctgttcggcaactgatattgtattgagatacgccagtcgattaaccttgaatgataagatgtgaaagaaataaagctgaacacggatgagtcggggtattccggtaaaaatcgaagaaaaagatggaaagcatggtgtaaatagagctggccgttagacgttcagggtcacatcgctctctggggcgatggaaaaatgcagaacaagagtgcgccaagcagtggcatcaagacacagcacaaaaagtaagaaaaaataagaaaaaaaataagaccggccaaaagtgatgcgcccagcacattcagaaacatcctggccttcatcgccatgcaaggcggactacctatcaacacatggttttggtttcaagagattcatacacacttgattacacttgtggactccgaatgccacgagtcgagctgttactccgctgtgacatccagttcacaagcatctcgtcaagctggttgttcatctccttgagcctcttgctttcctccttgaataggcgaccggtgatggggtggtcagggccagcgggaggtacatttgatttgtcgtggacaataataaacaagtcgcgaatgtcattttcttcgtccatgtaggatcgcagactggagtcgctccacgtcggggtgtccacagaaagggtgtcgactaaagcaggagtagccgtgccacccttggggtaattgacgtcctgtccgggtgatgatggtggagacggtggcgagcgagagcgtacgtctcgaggagagacattgcttgtcgaaccgcgtgcgctcatgggggaataaacctccacgggagaaatattgacaggagactccgactcatctccagccaccagcgtagggacgaatttctgggcggacgctggtccggccgttgtacgacttggatcgttaggtcccctccattgagattcactagatggtcgatcaacgggcgactccatggggtccatggattccagcggagtagcaaagggatccttggaaaaactcgattggctgataggcgattgtaacacaatttcacaatcttcgtaactgctctctctttcttcttgtgacacctgtcgaatgcttttgttgccctggctctggttaatggcctcgttgcccctggcgaactcggccatcgtagggtcaaggacaggatcaaccttcatgattcctcggggctgcttgtgtagcttgttgtttgagaatttctggggcttagagggtcgctgttgttcgggggacatagactttgatgagacagagtccatcgaggtcttgggttggggtgatgtgcgggatgccgactctggagacctctctaggtcgtcaatgtcatctttgctcttcttgcgcttgaataacccgctcagcattccaggttttttgtctttacgcttcttctcctctttgtctttggtcttgtcttgagagttcgagcccttttcgatagattcaaggcttccacgaggcttcaccaaaacgtcagccaaccagtctttggataagcccacaaaggaaacatacctctttccactcagctaatgtgtttgtgctgttttcgtcgcgaatatcgcgcaggagatttggagtgagagaaatcttcttgggctcggccgtgtcgtctttgaagaaggaatcggtgttccgtacagtgccatttctggatctactgacgggggcttctgctttgtaaaagtaagttcagataccgccagagagaagttgagttgagtgtgtttaccttctgcttcgaagaactcttcactagacgggcgtcgatcagagtttgaacgctgcaaatcttgtttctctacaccgttagcatcgacatgctctgtggggttttggttctctttctgggcttttggccgaagaggttccacgacaatatcttcagcttgctcttgcacgtcttcctcttctccgtccagagtctcgtcgtcattgaaaaagtcgccgtgttcggaatcgtcgtccgttgagtagtcgacgtcggaggcatcgatgtacgtcggggctccgaagttgacggtcttcgcattccgacggcgcatggccttcttcagaggattcttcgacttttcgttattgtcacccaacatggtcgcagacaaatccacgtttctgtgtttattcaatctggcaagcctctcggttggtgtttcaatgtgttccgcagggaggtaaccgatgctgccatccttcaccacccgcacaagccaccagtagctgttgctgtcgtcgagaagaaccatagtatcaccctttgcggcattcgcttgcccatcgaccgtcgcgacgaagttatgaagcgcatatacaaactcgaagtcgatatcctctgtataacatcagttaacgcccgattgatgtctatagtccccgagagtccgtaccatcatcgatagagggcgagctggagattttgtccatcatatcatcgtccatcatatcatcgctttcgccgtctgccaggtcgccatcttcattctcgtagtgattttcatcctcatcgtcttcctcgtcgtctgcttcgcgatacgcctccttgtcgctgcggtattcttgatttttgtgcgatccgtcctttaattccgcttgcgaatcttgctcggcatggcgaatagcaagcccttgattgggagcaggccggccgctcccaagaggatctggttgttcgggttgtttggtgtgatctttggcggaaggggtatcgtgatcttgaaggtccaaggtatctagtggcggtcaacaccttcaatttcgaaccaattggcctcgcgctccagaagcatgtgacctaccagctcggatcatctgaggcctagtcatgttgcggtgtaaatgagtgtggtatcaagagcaatgggattggaacaagacgtgagcgcaaggagtgactagcgatccaggaatacggaagtcaagaagacaagcgcgggataaaagcaatgcgcgagccttcaaatttcctgtatccaagtaatccacaaatactagacagtaaaaaaagtcgaccggggtcgcgagcacttggtgagttggtctaaatgagagacagtgccttgaatcagaatagtgggggctggtctgcacttcggtccagcacggaggtcgacacaaggagaaagaaattactgccagagcgacaaggtgggaaaaaaaggcaggaacaaaaaaaaggaacaaaggagatgtctgccaagacgacgttgagtctgaatagcaactcctttcacatctccaaaagccaaaaggaggtattcccaaacaagcgccccttgcgcgcggttaaacccatggcttgacccctgaacccatatgcgggcacgtaatattggccgactggtcagagcttctatggtatactggcctttgtaagtctactagattggagctttttttcaggcaattcaagtatagaataatatgctcttcggcactcgatacagactacacagcactgtgaagaactatcaaagtcgtacggagtacggagtataccatatgtaatcataattaccctgcatgtcgctaattaccgctgtatccctgacacatctagaaaattagggcgtgggatgctctttagtcaggtgatctagaaattatcgccgtcatccgagtttccccggtttttttttcccctctcatttaccagactactccgtacttgacgaatacctcactcgcagtctctctcctactacctttgtctatactcactgtgcttaatctcgatctttttatttgctttctcaagtttaaacccccctcaattacgccttcctttacatcaccactgtatcaaacgttctttccccacttttgacgctatcaccccacaatcataatcatcttgaacgccatcgcgaagcgtaccgaaacaaaaaaagccaagcagagggttatataaccctactgcgagcctatcacgggctgacaataccaacatttcgcctcgttatcctcgttagggcatggcacatagcgagagggccggattggcaagtggattggcaggtttaaggattgaaacgaagtttcatgagcggaacaagtccaaatggacaaatgagaattctgtgaggagagcgacgacggtgggcgacggtatcgagagcgatcacaccaatcaatctcatgattatgcgcgtcgccacgatactgatcaagaccacagtttgttaagtgatctacactcagcgacccctcccatctccgttcctcgtcacgatgcgcagcatcatgcagtcgatgccgatagcttcccgcataaacccgatagtgtgcaagggtctcctctcgacagctatctgcacactcgtcgaccttcgatctctttcaacccgaaggtctctgtggactccggaaaccaaattccactagaagagccactgtcgatgggagatgtgaagaaccgtccaccacaaaaatttgagtctcggagctctggactccgaaatgctctttcacaagatgatgagcatgtcgaagcgagccagtccccgaactggagtcctaaacaatctctggatcggagttctccgaccggggaatcccgaacccaaccctttgctatatctgagaatggctcgaacgcgggctccgagctcgttcgtccgacgtccctgacatcgcagtcgacggtatctccggtcacggacgaggtacggacccctcccgattactccagtcacacgttgctgtcgccattttgcgtgccgtcaccgacgcaattctttgcatcgcctgaagacaacggcagttcttggtcgggaggaatcccaacatccttcggaagcaagcgtagctctaccctcgatcgcagcagcagtcttcggaactccacccggcacagttctcggcgatcgactaactcgggtggcaagtcgcccgccagtatgtttctttccatgtggaacaatgttgaagagcctgctccccagcccgatgacgaaggacagatggttggagacgactatgttctcggaaagcaaatcggatttgggggttttagtgcggtgaaagaagcctataaggccgaaaagaacggtgaaaccaaaagacttgccgtcaagatcgtgaaaaagcagattacagggcgaagcgagcacgaaaacgaccaagtacaagccgagttcgaccacgaagtgcgagtatggcggtacctcaatcacccgcatatattgacgctcgatgccgtatacgaaacagatcacgccacgttttgcttcaccaagcttgctattggtggtactctcttcgatctagtccgccaaaatcgatccggtctagatacacaattagcaaagaaatatgcgtaccaactagcctgtgcaatccgttacctgcacgaagatgcccgcgtggttcaccgagatatcaagctagagaactgcttgctcgatcctgttgagtctgctgacgacacaacatcttcaaacttggtattgtgtgattttggaatggctgaatggatgtccatcgacaatggtggcgactctcccgatccctacgaggatgctgctgaccgtccaccgcctcaacaaatgggccctgccggatccagtaccagtgtggctggtagtctggaatacgcatcgcccgaactgcttcaatcagtaggcggtgttgttcacccttcagtagacatgtgggcctttggcgttatcgtctataccgttattgtcggctcacgacctttccaagactctttcactcctcgcgtccaagcaaatattatcagcggcaactgggatcataatgctgtatacggcgacactgtggacggcccccttcgccaagatcgccagtatgccctcgaattagttcgcggctgccttgaaatggatcccaacaagcgttggactatccgccacgtactagcttcgtcctggctacgagaggttcatgaggcagctgaaccctcacccgatactgtgtggagactatgagcctttgctcatcttttcttcgattcggtgattatgtcctgcccttcactataactcctaaggcaaatgagattgtcttgaaggttttaacttcaaatttctacgctgtgatggctctctcttcaccggcgtggatatttaacaggcgcctttgagatcactatgatacccctccgtttccttctctttgattattttgattatttgctttgcttctgctcaagactgttagcatgtgcctttttttttgcggtttctattatctattttcaatatcccctcgcagcacattcttggttttgatttttggttgaatttggccttggcattacgagacggacgactatgatttattcttatagcatgcgtggtgtttcatattattattatcttttgtcggacgttacatgggcgttcgtcacttcagttctttgctttgtgttgttaacttagcttgatggtttgcttctactgatgtactttatatctgccgatctttgatttaccgatctggctttgtcttctctactcgatttggtgagatatctgtccggctggctggcctgtcctgggttcggaacaagactgatcaagttatgtgttatattttgcaactcgcaagaaaagtcggctgcacatgcggcctctgtccttaaccgcatagcactttgataatctgatctatctggctcaaattacatgatattaagcgtattctatctaaaataacatttcgatatctaaattttgtctcggtgttatagctaggatggtagcatgggaccccccttgtctatgagactagcgccaggaatcagaataacagtacgaactacacaggtatatcgagctttccacaggtgcgatggtagaatctctcaaggtgcagataataaaacggcctttccgtatatatatgtgggcaggcagggatatttatacataaccctcgagatgcttataggtaatgcaactattcaatcttccctagaacgaaaggtcttttggggagtataatagaaagatagggacgagaagcatttcattgccaagcctaacatatccaacagaacatatttatacatatacagcagaccagtctaaaccagccttaaaaaaaaaacaatgccgagcaaacgaacaaaccatcaaacagagatcaagtatgagattctcaccaagccctcaaatctaccaaagcctattctcaggcaagaccttctccttcttaacaccagcagtagacttcctctcctcagaagagcggaagaacaaactgggtccctcaagcggcttaagcaggtgggaaagatatccgcgatgcgcaggatcacggtagtactcgatatctttacgcttcgtcggatccggcagtcggtacttcatttgccggttgttgactaccgtactccaggtcatccaggccgccgtagggcgaactttggcgagtttgtagagctgttcggagccgctagcgcgcgcccacgcagcagacaggaagctgtgcgtctcgccgtccaggatgcggcgaatggacggccgcgtgtagtagcgggtagtcactgagccgccggcgccttcgatggctgcgatggcggaggcggagacgcgcgaggcaacgacgtggattggttgtttcaagtcttgggcgccgtcgccgaggatcttgaggccgtcgatgggtcggctgatgcacccgctcttgtagagctccttcaatgtaatcggttgtttagggttgatgcggccttggtcgatccagtattggatacggtcgaggttgacggttgccatgtcgacggagaagctggagccgaggagggagactgattagagatgcactttgggggtttgtggtggttttgacaagggaggatgacttacatgttgacgccgccgcgctcgccgtgcacgatgatatccttggtctgaccaccattgaagcccgctgggactttgccgtgctggccttgacccttgtgaccgcgaccggaggtcttacccttgcctgaagcgggaccgcggcctcgacggatgcgcttgttgtaggcagttgggttgtcggagagggaggctaggatggaagcgttgcggatttgctgggattgggggaggaggaaggcgagtggagaggcattttgaaaggtccgggcggagaattgtgccagctgcgtaggcagccccatcagccggggagacattgtgtgtgaattgggttatagcctcgctggtgttgcattcgcgggttagtggtgagtttcgagatctctgtcggggcgggttatgtttgatccgactccgggatggccctaactaagtacagtatatcagtcgagctgggcaccgccaagccctgtgttgctcgttcggatctttcaagaaagatatcagctttttggataaagaaatagattgggttttttatgttccttttttctaatatatatatcggcatgtattcagacagtcgggtaaatgagtcaatatataacccaaacccttggttatacatctaaatctactatgacgctatgcaatatggtacaatgaaagatagtggttcaagggaaaaaaataccagttggcaaatctaaattcatatgctgcagagctaaagctatgtctgcgaaagtcaaacgccgtatgtatgcagaatgcgataggagcagtacattgccgatgtgctctgaggcacattcgacgggcgaagataaagtcaagaataacgccgcagatgccatccccgagattgattccgtctgcagggaggcgaaaaccgagttccttctaaaatggagcgccgaaaatatgccaaatacaatcgtgaaaatgaggaagtctgtgcagtcgaaaaaggaagacaggcaagagaagagaatagtaaggtgtacagtgaatgagataattttttttctcgtgtgacgggtcgtggcgcggtgaagtcataaacgcaggagatgtggtaaaacggggcacagaatgctttaaccagagtaaccggtgggtgggtagataggatgcaggtaaggagcttggttccacgcgtcaggctggatgtagggcagcaggccggtcttgcgagaggtgttacccttgctaagcggctggtagtgcatatggtcaaacggaacattgcgctgctgctgtagagagcttgacggaggtggaatcagcaaggtgttgacggaacgcactggccggtaaggcgagttgcggttggcgaggaagaaggaaggagagaggtgggtctgcggagtgtgggcggaataggctgaaccaaccggcgagacggtggcagaagacacgccgaatgggctctggtggtgccggccgagttcgggcagagaaggggtggtgtacatgctagattgcatcgggggtacggagagaggaggcatctgctgccaattcgccgggcgattgtagataggaggcatgatggctggaaggtgggagggtgccgtggaaggaagtgtttgaggcgcggggtaggaagttgggaggggaggcggatggtgaggatgcggaagacgagaaacgttcataggtgccaccggggccgaagtgggagtcaagacaggtggcagggtgggcatcgtattcatggcagtcgccgggaccgtcatcgacggagcagatgtggcggaagacggcgcaaaccgcttggtcggctgaagctcatcgttctcatcgcggcttcgtttccgagagcctcccatcgcagcctcactgccgatgtgctgtggcggcaagtatggcaatccattaggtggcatataccaattgggctgcggctgggatcggaaggcatcggtggtaggcgacggcaacttggacggcgactgcgattgcacgcggggaggcgaaacacggaacatggcggctgattcggcgggtagcatcgaggcttggttgaagtagtccccgaagagtcccagcttggtgtgccaccgggaccattcggtctcggaggagaacagatcatagcgaatgttgctcaagaactcgacctccataatgtgaatctcgtgcaccgcaatacccgatacctcagcccacgtcttattggtgtaagtgttatcgtcgaggtctgtggatgagtcagctacgttgtccaatcaaggaaagggcggtgaaactgataagaaccactcacatttattgccgagcatcagcgcaaccgtcatcaaacggaactcgctgcctttcttgcccttgaccccagagttgaatttctttaggcggtaaatgaatagaagggccagtagaatgacgttctggctgacttgcgtcgtggaaagaatcgtggcgacccatttttggaatccgacggtaggtatggcctccgcgaccagggaaggaacgggatgttggcggtcttcgatagcttgcagtttcgaggtcttttcgaaccagaagagacaggtcatctagaaatccagcccgttagcttccacctcacttttgtagacctgggaattctcacctgagccgcaaactcggccagactgcccttgctgttgttgatggatgaggggatgcggagttgcgatccagttgcaccggttgacttcttttgcgccgttggttccgttacgggggcttctttgggcgcggggtgggcttgcggtttcatagccatcatcgagggaatggaatcgaactgcgggcgagtagggccgtataggtgcgagggcaccctgttcggtttccccccatatgcgataggtggcatggcattgtaggtgacgccggtcatatcgtgaggaggggtgggtagaccgttccgaatgggaacagtccgataggatcccgaggtctggctctcaaaagcctttgccggatgatcctcagtcaagtcaatggttggaactcccagtgtcgaagaggaggaatggaagcccagagtggaagacatagggaaagagtggtgagcagagaggtcgacacatggagttttatttcttttatttcttttttttttcccttttgatcaaagcaaagaaaggcgtcggcggatagaaccgaggagtttcagtgatccatgttctcttctatcaaaggtgaaagtagagcgcagacaatcgatgagagtgtccaattggaatgcaatcaaggaggaaagggcgaccggcgatgattccaagtgagggaaaagtgaatatcgaccgttcacagggagtttgaatgatgtatatagagtagccacgataggcccatataaggaaagtagtgataaaccatcagagatctggctactccacttggagatgaggaaagcgaaaaacggcaaaaatacgggaaaatgcaaaagaatccaataaataaaaccaaataataaatgtcaaggcatccgaccccatccggagaaagcgatagtggccatacacagagtttgacccggacgcaggtccaggttgatcctcctttctgggctcgtttgggttccgggtttggacaatctagaattggaaatatataaaataaaagaaaggaacaaggtaaggtaacaagtaacgggtcagtaaccaagtcagaaataataatcagaaataccggttgatgtcagagccacggggtgctaagtggatgcaactaaaaagggtaggtcacagaatgtttacctggtcccggcctcacatttgcagttaaatgacccaagttgactatagcgtaggactagtgaaagcaaaaagagggaaaaaaaagtaaaaaaaaaacaaatgaaaagtaaaaccccaaccaagttgaaatcaaaagagaccatcctgagacccatctcagatccaataataagtcaggtttagcatcaataaattaccaaaccgtgttatgcggaagggctgtgagggtgcgcaagcatgtaggtactgcaaagagaaaaagggctaaggggtggtggttgccgggaagcgcgggggggggccagggaggtttgagcacggtggctggtacattacttgtcgtatactatgggaaaggcaaaggaatgaaccgaaagaaaagaaacggaagagaaaaaaagaaaaagaaaagaaaaagacaccaatgatgagcgagtggaagatcaattacttggttgaggatgaccgaccaaagagagggcagatcgggagtctcggtaagaatggtgcattcttaggtaagaaggcaaaattactgggtattgggccaatcagcacccagagcctcggtattggccggaatggtccactcccagtctcaggccatatttcgctttaatctttttttattttcttttgttaatttatcccgtgtacgaccggtccacggtccagggctttcatcttgctctatcacacttgtgctcgcgtactccccgacttgttagccgccagtcattggttccgtatattatgcccagctttatgggtgagaggtaatttattcgcgtcttttcgtgtcctcaggcttggtcttatcccgtccactgttccggctttcctgtttatgattcagggggatctcatcataattacaggctactatcccaattttgatagttcagcctcgggaggagggcataccggccatcgtctgattcgtccggcttttatgcactggatttccccaaggtatttccctctccaatatacagattggtcaccacatactactccgtacctactttcatatcatgtacaactggtacatcggtatttatctcccgtcaagacgccctggcatataccaccgggactgttggcccccagtgggatgaatgagcggtttcaccctgtttgacctgtccagacggcacaagcttcacgtaaggtggcatgtagttgcacttgtgatccagtgtagggtagaaagctgaaattgcaacgggcccagatcggctggtggaattggaatccatcgctcgtggcgccctaacggtcatcttttcgagaaaacaagccgtgacggcccagagatgtgcacactcctcgcaaactatattgctgcatacaccggtaccatgatgtggaagtatcgtgtctaagtgtctctgtcagcaactcatcctagacacgcaaggcatacctatcgaaccactggaatcttcagaaaccttcatccccatatggtctttgggtggactctcacagagacacttctctatcaccgttcatgtccgaaaccaggttacttgggtaacctccaaacttgcctagggatgatccaattgtgctattttagtggcaaaaccaccaagcgaagtgtccggtcacccaaatcgtggaccttcataaaaaataagttgatcaggtgaattttataaaaaaaaaaattcaaagaaagaaagaaattgcaccctctttctctccactttggtttctgagccaccgccacggaagatgtttcgtttctagaacccccagacagaaggtggattgaacaagggaaagtccactgtgtcataatgctccatcttgttagacgatctatgctgttgtcgatggtttgaaattttctttttcttttcactttggcccagagccgactcctgattggtcaagtgctagagtgcccccgtcttttactattttaggccgtgtgttcgttcactcgtcacagtcatacacaaaagagccctggagccttgggagccagcgtcaaaggttgtttgactcggagctttgcccttttgtttcccccttgatctacattcgcttctgctcttctctttggtgggtcgaaacagaaaaaaaaaaggagtttgctaaaatgaagtctttacccttgccatcccggttgcggtatttcatttcgactgcacaattcccggtagctccacaagctttacctatcgcctttcgcccttcgcgggtgagattcctcggcacagtactacatgcagagttcgcctggccacaggctatttctaacctttcttagtctttaattattgtatagagagagtggggggaaaatatatttaattgcttttttttggaaaatgtcctcccttggaagaagtccggagtatcaccccctgtgtgtatagccaccgtctctttagacaggttgtacctccgaccattggcgcatgcagttggctgcgaccgctatgatcgtgatcttctcggcaatgtcataaattcgaatgtgtatcgtctaccgacatactgagtgtcgacctgatgcacgcggaaccccatcctatcatggaaatcatccgagctcacacctcgaccttaggtccgaggtacttctatcacctaccaatcctaccatgttgtatgtactccgtataatcacggggcacttgggaatatctccgcagcactttgcgcagcactttgcgcagaaccacacttcaatgttgcctcttgattggcgacgactaaatatccagagttttcactttggtagttgcggacagtgtgctccgtacgagaaacccacgcaacctggaatctaaccagggttacggagtaataatggttgggatgtctagtggctgatctaatctcgcaaagctgaagccgatccctttacgttgttgctcctatatcgtatactccctactccgcaaggagtaacttcttctatagtataatgataatccattcaatcaacagatcaccggcttactccgtactcagtctcgactatcacaaccaggatgtgttggctctattaattacgcattaaccctgacaccttccttcatcattacacggcggggcttggattccggtacaagccctctgcgcccggcatcaatttcctctggaattttaaattgcttacaatattgtggcatttaatttccttttctcttccaagtaacctatcttatgcgtcagtcgcaaggccaaaaaaccccccctacactttgtgagaacactcaggatctcaacgccgtgttcaaccaccttgcgcctcttacctagcacggctccttgcatgtctcccatctgtgcctaaagtactgagggcgacggaaatattaaatagcataggaaccctagatcattgcctcgatatcacataaccacacatgtagtattctggttcctctatcggtgcatacactatctgggattttctccgctctcgtaaccttgtaatacgcaggttacaattatctatgtcgcggattatcggtttgatgcgctgcttcgtatacattctgttttcgatttcaatagcataaggctgctgcaattaatcttctcttcctggcgtcatttgacccactcccgggatgaaggacacggcatgcaaacatctttaaactcttagagtaatccttactagacccaacaaccggggtggaagttggtggaattaattggagactcgaaattacagatccggtcgggacccataatgtatagattgtcgctacgagtaaaacgttaatattacctagatgctttctatatgacgtcggcatccgcagtacaacgttctatacggggtatattggatgtgatatacagtatgtatatcctgaagttgtcctgtgggtgactacggagtacttggcacccatatccatgggtaattctagcgctgcagtcttacgatgatcacacccattgaccctgcacgccaccccagagggttgcctcttccctttagtctcttccgagtagtcaccgacagaccgccgcaacccgacctcgacccccggaagtgcacaatttgtcaagggcaaagacaagggcaaatgcaaatgcaaatgagctcgggcacggccgtgtgacagaacggggtcatctcgaactatcagttgatgtttttttttttttttgaggctgatctcggactcgagactctgtgcttcaccaccccgcgcacaggggccaaccgccagagatactccatagagggggcgagcccacacaatccacacagcccacatgctcgcaaagtttcagaggcatagcaagttgaggggcaataataatcgaccggttctttttttagctttttgactttgtgcttgaccaagacttatctcacaatttgtctggattgtgcaaagcgccccgagcaccaagcaaagtgctaattccgagactaacagggtactaacaggatcttgaatcttgcctttttcaaagactctgcttccgcccgtgatttgactttggcggattcgagaatatattccctcaatggagccttggctaatcgatactctttttgcccccgctcgggtggcttatagttgatcaacgatcaatgcggtgacggtgtacggagtagaatctgaggttatgtgatctctgatatggtctagactgcaacatatgtactgtagtcagattcgcatccataatatactcggcacacaaactgtgggggaggacgtattacgcagcctttgtctcagtcgctttcaacgtctaagattagttttccaggcttaataatgcaagacacttggggcttgggagtctagagcgatgataatatcaagtcacgactcgacgatcccagtcggaacgcactgcaccggcatccgatgccaggaaataaattcttctgccttaacattttacttagctttgaatggtggagcagtcaacgcgtactccatacacattctggcttgcacctttcttgctaccgagtaccatagtccaaagtgtacacaagatcgcatattccgtctcatccgggagccacttcttttcacttttttgttctttttttattcgaagataaaccaaaataaataacagtgtagtaaaggctgtcctgtgggaaataactcctctgccccggtccaagacgtgttgcaatgccaggtacagtcccgaggcgagctgggcatgtttccaatctgcagccagtagcactgtactccgtactcttctgtacattgtatatgcgaaatacagatatgcaataataccagtgccagtatgaaattcaaaagagaaaaaaaagcacggatatacggcaaaagaaaccctccaatctcgggaaacttcacattgtcacttttcgattttatgtggatcagcggactgccttcgcctgcacggcacccggtgggtgaacagcacatatgtcacagtcatcgacatctcacagatcgaatcactgtcgtttgagataaccgacctaatgacctagactcaatcgcgtttcaattcaatcatcattcaattgcatctccagatctatatcgcttggaactaaatctttgacctctcggagttggtggacgacggcttggtcatttcaaggtctccggggcagacatggtcatagctatgaccaggaacacaggccagtggcgggtttgtgcttttggcgtaaccgccctctcacccttcgtgttcttttcaatcttttcttctctttggcaatcgcggattgaggccgatcaacttccaatgtttctttgttggccctcgaaataatcgggtttattcaatcgtgctatttctgaaaccgaacagggctttactggtctgatcatttctttgaccttagtgggttactggttgtgcgtcgcgggtgacagactgctcacagttttgccttgggtttctttcttttcgtttgcctggatcggaatcgactaacctggatgggatgcaccatggcatgcggttgattcttcgtttctgatttaggattccgaacacaatatgccaactaaaaaaatgcaagccgactaaactcatgcaagttgcatatcggtctagccttgcttcgggaattcaaggagtcagattaaccccggattaaccgatgcattcgccattgaattgcatgtctattcatttgcagcacgtaaactgattcctccgaggagactaattgcgatgtctaattctggcctggaagatatcttctgcgttattgtttcgatcataatgccacaacagttcattcgagaagaatcaagcaagagacttgaggtttcataggtaagcattttcgaagcggattacatggccattattgagagtctgtcttgtattttttggtaattcgagcaatggtctatctactccctatcctcttatcagacatttcagaccactgatctgtgaaaaggaataattgatcatacccgttgatatcaccctgatctcattaacattctagtctgatgccttgccttttcaaacccgaaggctctgtgtgtacagactcaagacaggaagcaatacgccatcaaccaagtgcatccaatcactcacaggaccaaccagttcatgttgatgagagcaagcaaggcggaaaacaatccaatagacaaggcgaactcccaacggaatagtaccgcactctacatgacacatttcgctcggagatgcagacacgaagccatagcagcacctccgacatcataattcggcctcgtcatggccataatggaacctcgcctttcccggatccgaactatctcatgaagcgactggccaaatttccacctcacagtgcggctatatgtacatttcccccgtaacacagacaaacgaaacccgaagcataagcgatgtcaaacccagccagacagagccaatggaacaaaaggaagtacagctcaagatattctataccacaccaatctaagccgcatcttgcatagccgtacctccaatgaagatatgatacctcgtgacacggagaccccgatatactcaaccaacccagatgcgattcagatggccgcgtaggcggggcaaataattagctgaagggtgatattatgctcatacccgcgtaagagcacacttgtacacttgtcaagcaggggttgggcctactcaatagacagactcgccagttgcaggctcccagcactgcttacttgcatacggataggcggacatttgttaacgccgttatgtttggaatttgtccgggctatcactcgtagatacatgtagaattggtatctaggctctgctattacgggttgtgatgcagtaggattggatgtgttattcttctttctagtttggtagattgcttatcttcgtgttatataagagagtgtggggtcctcgttggattatatatcatgctacatgtatcttattataagctctttgcaattggatataatattatcttgttctagtcgcaaatttagcattgctcctaatgtccgagtgtctgtcacatcggattatgatgtctcggttgatattctagcttatacgtaagtttttttgacgctctaggaagccgaagtcatatagctgcatttgatatgccacagaatcaatggacgaccctcgccctttcggtgatatgagcataaacgaaaattttatttatgcaatattggatagactaatgaaaagaaatctcttaggtttatatcacatttgcagatatccacattttttcttggttttacttatacttgcatctgaagcgctgagacctccactcctagcagattttcttctatgatgcgtcatatcggagcgggtatcaagtctccacaattagcgggtaatagagggcgaaaatgtgtcggacacccaacaagaactccgactgacacgagaaagaccgggagcgctgccgattgctcacatcagacgtgcgattaagctcccagagacaatgataggccgacccgggccgacgtttcctacgatatgcacggagtaactaggtcgatagtcagaccatcgggatttgtaaggctatagatgggagaaaccgggccagttatgaaagtggagcttcgaacttccccggattttgtcaaatatagctttggcgcgggaaacgttagagaatagcgtatttatgtggaacatagacgtgcgtataaagagagtccgtcggtatgcgggtaataccggttgagcgtcggagaatatcgtaggtcttgggaattggggggcgggggaggaaaggggaatatcgttcagcaaggtgagggatcagttcgaatatcatcaattcgaccttgagaaagagcgtggaagcgtggaagccaaagtcgtagcataattttaccccaaagaagaccccgaccgaccgagtttgaagatcgccggttaattttctcctcaccgggaaattgcttgtcccctcagttctccaattttagtatttcttgtcctttttagggaggtttaggcggttattcgagcttggacaggaaataagtacaagtttcaatggacgttatgagcttagatcttagagcagcctaactatccccgtaaatagcaggtgaatcatcgcagtggcagaaaaaaaaaagaggaaaatgtacccagtacctctgcttgctgcaggaagcacgcaatgggggaagtaccaggtacacagctatcccctttggtccggctacaccgattcgcctaaagcagcagcccaacaatggagcttatcaaagcttttttcttcccttcttaaattattgtgtcacccttgattttcatcctatttgtatttcctttactacatttggtgcgccctttcacaatggctggcagcacgctagcaattcgcaagatggctccgtccatgcagctgtcgtccatgacgcgcagatcgatgtccacgcagctggcccttcgcgcaaagccgatgcggtcgaccaaacttatccagtctgtgtcgcgcatcactcgtcgtggctacgccgatgctgcctcgaagcctaccccttcacccgccccgaagcctaagaagcgtttcagagctctgcgttgggcctggcggttgacttggctctccgccatcggtctaaccggtgctgtcgcatacagcatcttcgacctccgccaacccccggaccaggcccctcctgacccatcaaagaagactctggtcattcttggtatgtatcggtcgcgattgtacccctacagccgacgtgtcgctaacgcgactgtgctcgttcaggaactggctggggctccgtttccctcctgaagaagcttgacaccgagaactacaatgttatcgtcgtctctccccgtaattacttcctcttcactcccttgctgccctcatgtaccaccggtttgattgagcaccgctcgatcatggagcctattcgaaatatcctgcgccacaagaaggccagtgttcagttctacgaggccgaggcaaccaagatcgactacgagaagcggattgtgtatatcagtgatgattcggaagttaagggtgatatctcgcacaccgaagttcccttcgacatgctcgtgatcggtgttggcgccgagaacgcgactttcggtaggattcactctcgcatctgaaacgatgcattttggactaatatcgtaacctataggtattcccggtgttcgtgagaactcctgcttcctgaaggaagttggtgatgcccaaaaaattcgtaagcgtattatggactgtatcgagactgcctgtttcaaggatcagaccgaggacgaggtcaagcgtctgctgcacatggttgtggtgggcggtggccccactggtgttgaattcgccggtgaactccaggacttcttcaatgatgacttgaggaagtggattcccgaaatcaaggacaacttccacgtcactctcgtcgaggctctacccaatgttctgcccatgttctcaaagcaactgattgactataccgaatccaccttcaaggaggaggagatctccatccgcaccaagaccatggtgaagcaggttaccgacaagtacatccaggccgaggtgaccaggcccgacggtaccaaggaacttgagactatcccttacggtcttctcgtctgggccaccggtaatgctatccgcagcgtcgtccgcgacctcatgtcccagatccctgctcaggccgagtcccgccgcggtctcgctgtcaacgaatacctcgtcgtgaacggtaccgacaatgtctgggccgtcggcgactgcgccattgccaactacgccccgaccgcccaggttgccggccaggaaggtgctttcttgggccgcctcttcaacaccatggccaagaccgaggctctccagcaagagttggagaccctgtcagagcgccagtcccacgccaagggcgacgaggagcgcaacctgattttcgacgagatccgtgagcgccagaagcagctccgccgcaacaagcagatcggtcccttccagtactcgcaccagggctccttggcctacatcggtaaggagcgtgccgtggccgatatcagctggctgagcggcaacatcgccagcggtggtactatgacctacctgttctggcgcagtgcctacctgagcatgtgcttcagcagtaagttctaagctctatccaacactgattgaaagtcatcattaacatataatctagctcgcaaccgtgtccttgtctgcctcgactgggtcaaggctcgtctctttggtcgtgatgtctcgcgggagtagacatatccacccggctctgatgaccttctgtaatcttgccaatcccactacattttccttttggatattcaatgccttccctgacacattgactgtgtaatgtgtcccgctacgccccccttatgccatccccaaccatccttctctttatttctctttgcacctgtgaccgtgataaacatattcatttccctttttttctcatgactcactgttggtgctgcgattggttccgcccagagacaaaagcattaattcgcatcttctttgtttcactttgggtttcttttcagactgtactgtacgctataggaatatatagactgggtttggggttgttgtatcaaacctgtcatttccatctgtgtattatctttcttccttgcacagtgtggtatcacactgcgtgcttggactctacctcttgctcgctgaacgaaattccttttattctgcgggtcaatatcacagatctggctcattgtcagccggaggaaggtatccgtcgccgttttgtactctcttgctctgcacgcgcacttccaagcttcgcacctccttgtgtcttctcagcccatagcccttaccaagattgacatctcccaccggcgatcgaagtcctcataccaagtcccacgcccaagtattctcgccgaattgcggccaaagataggcttcagtttatgacgagttagcttgatgacagtttttaggaggaggcctcatacattcatgtgtaggtcttatacttgccggccaaactctagtgtagctaggatttttacaaatcaagaatgaagaaaggaatagattatcaaccttgcgatgaatggtctatatatacattgacttcaaagcagttagagatacatactcccaagaggaataggggaagaagacggctaaacaggataaagaaagcgatgagaacactagcagaggtatcgaaactccagatcgagaagaaaaaaagagtgtttcgcacaggcagtaagggagaagagtcaaaaagcccaaacatcatatcttctagaaaaggttccaacggccccgcggttcctttccaggaggcgtacgatctgatttccgagcgcggccgtcaagctgtcggatgccttcgatcttctgcagagccagctccagcagctcctttttgcggatgatgtccaggtgacggcggatgcggggatcctcgcgggcaaaccgctcgacctcggcatctgaaagttgtcgtccaagccttgaatcaagctcacgcgggaaattatagtaaaactcagataggagctcgacgttgaggaatagcacggccgtggatgtaagtttatctgccacaacatctaggaacacctctgggcaatagtacttgttcttctgtgttgcgcattgcttggaccggacagcgagaagtctcatcttgataagatccgctcggtctcggaggaagagaccttctcgtcctagataatacatgtcagtgtctgtaaataaacgaaggagagaaataccaacctctcgccaacaaggcagcactgaagccacccgcaccgccttcgccgttgccctctagtactacttcgccctttcgcactcggtcgataaacgcgacaacgtcttggagttttcgctttccaaccgtgtcttccacatgcttcagggccgactcgcacgatttgagctcttcctttagaactttgcccgcgttatctctgcctttagcccattcaggatcttcgatctcaatctcaaatttatatggcttgatgcaattttcgacttgatcgctggtgctgaaaaacttgtcattcaaaataccggtgcatgcatcggtgatctgtttgcgggcaccagggtgggaggcgaacgtagaggaggctaaaagcgagtccacatgattgttgagggcattggcgacaactgtcgtagccaaccgaccaattccaagctttgttaatgaagaagtagaagcatcaagcttccggtgccaatatagggactcagcatcggcttttggaagatccttgagaggatctaattccagcagcggaggatctaagtcctcgactggcttgttccagtaacgctgtgccagaatgtccatgactcgctgatccaactctgccttaagcatctcccgaacctgcggtcgcccgaaactttccgcgaatgccttgaaggagtgcttgaaagcatcgaggctctcagccaagtgggactccgcgctcaaaggccgatcattatattgaaccttgaactcataggttgtctcttcaagctcttggctaatggcgtctctggttccagacaggctagatgacatggtctgctcaagaacctgcatcagtgttttccgtaatgtcgaaacaccgactgagacgtcagagtggggaccgaattcattttgatgcgcagagaagtaggcatgttcatttttgagaatggcgctagtaatgtttccagggcctctagaaaagagagctgttgtttgaggaatcctggtaacaacacccacgtaacctagccggagggggtattttttatcggaaaggacatcgtggccacgttcggggctgacaaggtccatcttcgtaatcacaccgatagtccgttcaccccgagggtctactcgacgactggctcgaagtgctgtcgagttcgctaggtcaacgtcggcagccgagatcgccaaaatgacatttggtggctgaatgtacctatcgcaaagatcaacaatcttttgcttgagctctgggggctgatctcggcccgcaacctgaatatatccgggcaggtcgatcaaagacagatccggaacattgggagaatatatcgtaagctgaatgggatcgtctgtgacacaatccttttcgggaacggcaaggttcaggtccgtgagtgtgcgctgaacttgagaaaaatccgtgatctttccgagacccagagccgggaattcaccatattctgcctgggcgttaggggtgttgaccaatgtgagctcgattggccgccgggtcaccatgttcgagcccttgggcaagaactcatggccgacgatagcctcaagaacagaacttttgcccgacgattgggatccaatcacgacaatcgacggaagagtgagcgtgccggactggccgatggtctggagaatattccggatttcaatcattttgcgtgtgagcagcatcatttggtcatcctccgcaacatctctctccggtcgcaaatctccctcccccgattgagcgtatccaaatgccgcagtagtagcagcggcggcggcagcagtaccagcccgactttgtttcggctctttgcctccaccaccagacgagtcaccatttctcgactcggactcctcgtcgaaacgtaggaccttctgcagccagtcaggcatttcgatgtttccggtcgtcttattccacccgcgttgtgtctgatcagccatgccctgtagcccttggaacaaggtcgaagctgtattccccgctgtgtccgaggcttgcctgaagacatccatcacatagttaccggcctctggaagattgaatcagcctgagcttctgcttgcagtgagcttgatacacgagatacatacgagttgcttggtattgaaaataagctagacccgcgattgttgcaccgccgaacatagccggaatcctgaaaagcttcaatgcaagcttcggaagcattcgagcaaatgagattgatcgaacagcagggacattgtggatggcatttgcacccactggccatgctcgtcctctgagagcagcgccaccatctgcgcgtagcaggcctccggtcctcgagcctgcattatggatatggcgagctagttgaccgttccgcaagagcggtcctagccgatgggagagtatcctcccactcattattgttgtaatatcattcaatagaaaatggatatgaaagtgatggccttaccggatcactgcacatgtgacatcaagcctaacttacagtccccgtgacctgcgcaagtagccgcgtagcttcccgtagcttccagtaataccaccgtcacgtgaaatatgacgtgctgtgcaagggaagtgagtttgctcttttgtgttgatttgataaaaacaatctttcctcttcgtgatctctagcaaaaataaagctcaaatatcttgcttttttggctgtaagatcgcgggtgacgtttgggcatctcaccggttcccaacagtcggtgactcttcttccgccccgaccctcctcatacatcctttgacaccagtacggccttgttcagactacaaatttggcttacaccttgaagctactagtaaatttggaagtggaatttgatacagtgtcatttccaccgcattgaatccaggccaaacatgtgtcgattcctggtaaggtccatccctccaagcattgggcccgaagctaatatctcgattagatttacaaagggcgaaatgagatccgtctcagtaagctgataaccgagccaagtcattcaatcctcactcaatcatatgattcacgcctgagactggtaagtacccacataattagcatatcgcaacacgctgacatgtaatatcaaggacaatcgccgtcctgtcaacggtgacgggtttggtgtgggcttctacacagaccccaagcttggaccagaaccttgcatctttacttcaacactgccggcctggaattgtgagaatctagagcgactcgcttccaaaacatgctcaaacctgatttttgcgcatgtacgcgcaacaaccgagggttctcttgccgaaaacaattgccacccgttccagcaccagtccttgatgtggatgcacaatggcggtatcggtgggtggagctacatcaagcgtacgctgggaagctcactcgccgacaagtggtacctgggtgtgaaaggtggcaccgacagtgagtgggcattcgccctcttccttgacttgcttgaaaaggaaggagtggatccaagctctgaccccggccctgagggattcgggcaggctctcctacgtcgtgttttgatgaagaccattgccagaatcaatgaaatggtcaaagaaattccaaagaaatataatgtcaccggagtggagactcggagtttgttgaactttgctgtgaccgatggccatactgttgtttgcactcgatacatcagcagcaaaacagatgagcctgccagcttgtatttctcttctggtactaagtggaaggaaggtgaaacgaaaggacacttcaagatggagcgacacgataaaggtgctgatattgtcctcgtggctagtgagccaatcacatttgaacgacgtgagaaccctttctctctctctatgcctatgaacatatgctaattttatacgtagacaattgggtgtcagtcccaacaaattcagttgtcacaattcacaagcagactgttatgcttcacccaattcttgatgaattctatggcgaaaacctcaaccacgaccgatcttcctgctttgctgtatccaagggacttgttagcaccgctcctgggacaaccgttcgaccaacgaatacgcaggagtcttgcgccccttcagcaacttgcaatgctatcggaaacaccaacagtggtatggaaagcttacgatctggtcatgttaccgaatgtgccgtgtcgtactaaattcggcatcgagccgatcattcttggagtctactgtgaggttcagccagagacttcaaagcactgtcttaatatggcgttggaaagatgaatatgccgggatatctgagtcaaattggagtttatgagttggaatgtaagcgtttggggttgtgtggtctttcgggttatataatttgcagaattcgaatgtaaaatgaatgtcaaattgaatttggagaagtattaactactcagccaagagtagaccacatggtattcatacaattggaactctgaatccatgattccggtttgtttgtatatatataacacccggtcacgtggttacgtatcatgacgtaacttaaaatcaaagtccacaggtggacctaactaactagtcaggaagaccgagtcaggcatcatctgcttggttaaattactccctaactctctatgtctatttcatgaacatggttgtctgagaatcttaaaatgaggaagactttactactcgtctttattcacggtttcaaggtatgcaaaatgcctgcttgttgaagacctggtccccgcaaagaattacagatttcagcccaacaagatttgtttttttgacctagaacttacgttgactgataaaatccaattctagggcggcgatgatacttttggcacgttccctgagtatttgcgcgttttcgcaagcagagcacttcctgcggtcgaggtcgccactgctgtctaccccaagtatgagactaaaggtgacttgaaagagtgcgtggcaagattgcgagattggtaagactatgctcagctcctcttgtgaacacatacaggttttacttacgacgatatctcttctgtgtaggttacaagatactgtgattgatcttgaagtagccagccatacggcatcacccaccgttgatccctcggtccatgtcgttctgatcggtcactcaatgggaggaatagtaggagcagatgttctccttttgctagcagcggaacaaccaattcctcgaaatacgcagccagggttaaatggcatcgaatctatcgtggaaccgggtactttcatgttccctcatatacaaggagtgcttgcatttgataccccattcttgggcatagcgccaggagttctgtcatatggcgcagaaggacactatcgtactgctgcaaccgcctacaataccttctccgaggtagcaggtctgttcggttacggtgggaacaatgcatcaaaccaggggaccacccatgcatccccgaaagagtcccccaaaatgtcgccttccacacccgacgccgccgcgacaccttcctggcaacgatggggtaaatatgccatgttcgctggcgcggctggtgctgttgccgctggcggcgcagccttatatacgcaacgccagaagctcactgacgggtttggatgggtatcatcgcacctcgagtttgttggttgtctcgcgcgcacgtcggaattgcacgagcgtctcctgcgattgtcaagtctcaaggaggaacgtggcatcggatgtgtgaacttctacacatgcctcggaaaaaatgcgactagtcttgtggaaaaaacatcagcaaacaaaacatccttcagccagaaaatcattaggtcgaggaacaggaccttctgttcattgccagcagaggtggaacgtggcgagggatctcaaagtccaggacttttgtggaccagggcagttaatgaccaggctactgacgaaacaaacgcacatattaccatgtttctgtccaaagagaatcctgcattttttgaaatgctcagggaagcgtgtgcggtcttggtcaagtcgatagacaaaggctggtatgattcgtccaccgaaccgcccaagaaagacgatatcaagcaaccacatgcaacagagggcacaaaaaccaaaacagacggggacttcatggatggcgatgacgttgttgtcgttgactgagatctgagatctgagatcgcaaactctaattcgacccacaaatcccccagttttcgttaccatagacgttctacaagaactctactccgtacctatcggacttcccctggtcggcataccacttacttagacttcgcgtgcactgcaccctagcgcacagcgaactacatgcaaaagattcgatcaccatatcgagatttacctccacaggcaaaactcgcaatgggccttgatcgtcgcgcaaagtccagaacaaggcggtgcggtcgtattcactccgcttcgactttctgagcagtcatacccgaagttttctcagtggacgttttcttcgtttgggaacatggcagtgctgatcctgtgtcctacttgttccactctctgaacgattgtctgcctactccgaagcgatcacacccttgaactggtatgacgtggtcccgagatgttggggatttgcccgggccgttttgcattattataacgcatggtaacacttcaaagttttctcttgcgattcacattagtctatagcttcttgttatgtagcctatccctgagggtctgacgcctagacggtttgctgaggggtgatggacgtcaacttctttccaaacaaacttgtcgctaggtcgaaatagaactctcaattctcgtatattgtttcaatcactagtggtaaattgcgtacagttttctctatgccaacacttgatcggaagagcaaaaagcaaaaatatcttccttttattgtacccctacgataattgataatcatccatgtaattagtatatgacgatgtaacttatacccttgctagaaagaatgccctagcgcgccgatatggtggaagcatttggatagccgcgaaaaaatatataaatgagatatcatgaagtcaatagtcacatatacagcgcttgaatgaaagaagaaaggagcgatgaaaacaagaaagaaaaacacaaggaggtaaggaagaagggtcaataattatgatgaccgtacgttgaagagcgatggtggtacaggctgcccgcatactcggagttattgtcggggtagaccgtagctcggcgctcttcctcggatagaagttccttaacctcccaagtgtttggcttgacaccgacggagaattccagatcctccttggtaatcgagtcccaaaactaaagaaagttagcaggaccaacgccataggcgtgaaacgtgaacttaccttgtagaccatcatgactgcgaggagattgcagaatgtagcaaagaaaaggccgtccaagtaatgctgcacgttgttgcagataacgtcactgaatgcatacaatataacctggccaatgatgaagacgaacacgccgaacgagatatggcctagtggccagcggtcatccaatgtgttcgcaactaggagcaattgcatgatcaaatacacagcgatggagatggcgttcagcaagtagagcaccacgaacaagccagtggtattcttgggacccatcgaaccccatgacttgaaagtcgccagcgaaatcagaaacgaaagagcgaacatcgctgcggaggggactcggatcaaccaaacggagagggctgtgccgtcttcgtacagctgaaagccgacgaacccgttgacgagaagacaggtgcatagcgcggatatcaaaccgttctgaacagccacgaagtacgggaacgggccacttcctggaggaacgacacctgcatcaataagaagcgagaaaagtgtcagagctaggtagatgtagaagaaggtgacgatctctttacggcctatttgtagtgaaaatgtcagctagtttgcgccgaatgtgagtgaggaggatgccagacgaaccgacggcagtaaacttagatcgaacgtgcaaaatcatgatcactgtcatgctaagcgccatgatatgcataaaggacgcggcgccctcgaatataatggtattcgcaacctcaatattccgcgcatagcagttagatatgatgccagttgacccggaaattgtcgatgccgggcccaccaaggagcacaaaggcacgggcgccttctcgcatatcgtgtcgaactgaccgaaccccatgatgtctggtcactaggatattgagtagtgcgacaacaaacagttcaagttccagtcgcggcgggtcacgaatgttgagtggacggtctccacaacgacgggggtgggatggtggaggagatgacggtatgtgcctcggtccccaataacagcgtggctctttctgcaccccagctgcactatttaaatcggctgatgcccgctgacagccaatgtcgaaggtcagatcacccctgtgtgaatcgttgatgcgaggggaagtgtctcagttttcgctttcaagatcacgggattggaatcgcctttgtaggtttagcgtcgttgctagggtggccccggggcggaacctggcttagtcattcggagatcggaaacgctagatccaaaatggaatagctcgaagagatctcatgtgactcgggtccgaactcggcccaagccgaactaccacgctagttatgtcaattatacattaaggggtcagggcacaataacacaccatccaacccaatttagaaagtcgactagggaccgttgggactatccgcatactgcaagctatcttatctactttttcggtctccacaagccgttggacttatgtgatcaagacgatttggtgctggtcatgattattggactgtagtctacggagtcaaagttggggttagatggggtttgtattgggcagttcacctttttcctttctctttctcttgttattgaattagacttcctctgtatgtggactgacctcttgtctccacacgaccctacaactggggcattgtcgcaccatcgtctactttgagactagggtttaccaatccgaggcctcacagtcatctgttcgccagaccagctcccagttaggtgattgtctctatgaatggatacaacgacgcaatcctgcagatgggatggcttgatcttgatccgagtgaatggtacattttgccacggacaaatatcgcctatgcagattgcctgataatcggcttccgagtcttcggaagcgattaaaatgaaaggtatccattgcatcaggtttcatctatagggcatgggttgagatcaagtaaccttgtatcgatcccccttttcttttgacttttgaattctagcgtatagatgtcataatgcggcggaaagccgttttctatataagctccccgatctttttgatgccatcaacgctactacactgatttgtcaatctgcttagaacactttatagcattcctcaggtgttttgtttcatgtataccactcatagtctgattgtcgaacagtctttgcaacattatatgactatcaaatgtgggtaagtcccgtcgatcctcatgtggcacagaggctcagacgcaaagctccctttttgataagaaataaacaaagaaaataaattatcggagcttatcaccggctccgactgcccaactcgtcctttctccggttttccaacaggcccaatcttgcacaatgttatactatcgacaccagactatctcccaacaagagaaatcctccgtgttcgcctgacccctggctagagagaaaaaaaaaccagaataagcagtgccaaggtgtttgacaatttggcttaaggtctcgagatttaagagactgccgaagatatttgtctcatgcatgaagatcccgactagcgccacgtgtgaatttaagaagcatcaacggctgcgaggaaccgtgtcgatctcccatctacccgatatttgcgatgttcgttctcgcttcctgacagtcccctaaacagaatattaaaaggaaaccaaaacaaagcaaaaacgctagaagaattcctctcaacggtcatacaagttaaagcctctctttatgcaggacccgctttcttgacaagggttttagggggtggagatggtggagagaatgccgtgcagtactcagtactgtatactacatctttacccatcctttagggatcgaaggtaaatttcgtttgaatatcttgggttttccattaattttatttaattttcggatttttatccttttactttattttattttatcctgtttatttattgccatgcccttgggcgtcatgacatccaccctccaaagcaaactagtgactcttatatctagtcgagcctccatctatatttttccgatttcctacaccttcaagattgatatctcatccctcacagttcaatctattacacagtgttgattcttttcattccatttactatctccccggtcatacttccatcgcagctggccagtttcacagatcaaaacccccctcgatgggatcgaaatgtgcaactttttcaaaaacttttacatatattccacttgctccaatcctgccgcccacttcctccgcaccgaaatggaggggacaaaagacaatagcacttgcaaagacagtccacacgaccgattcattgtggtggtgggcaaatgtgtactctgctcgtctgctcgatgattgcctaccatcattcgatacttcgggcctcagggtactcgaaataaaaatttcacctctgaaactcggtcaagggcattttctaaagtttaccatcccgcttcctcctgtccgtggtccttggcatgcaagactccatccaggaactatgtattcggggagagccgaccctccaccgataaacgcggctttctgaaaaacattcaacccttctctacgtgactatgatcgacaaatttataaaattcggcttctttgatttggatttgtggggcaaaccgtgccggtttaaactttgcttcgcggtcgacgcgttctccgatactttgtattattggcttttgaagcgttcatgtcgtcccgtttcattgtatctctttttccctattgtctttgttagcgtctggtaccttgtttgggagtctggtgggtttcatatatgaaacttagacgagtgaaccttctgatttttcaggctttgattccccgatttggagggtttgccctaactatggttcacttcaatgccttggtatgatccgagagctctttgcttctaatggacagggagctggaaaaaaatgtattgtacaagtactcaaccaattttcaattggtccctaaatcacatgcttgttggaatgctcatgcacgcggaacggatatattttctgcgacttctctgactggttcccaacaacgttcgggcccaaccgctcacagataggtaatgcaatccgttcaatctaactctctaggggccacatgcgcgacgtggttgatctctcttccatcacattccgccatgtctaggccaggggcaaaagggggtgtcctaacacagtgcggaaagacaaccgcgcacaagtaaaatgacaacaaccaagtgactagagagagattaaggtacctatgccgtaaaatgagcatcgaatggaggactcctatagttcctgtagtagggtcactatctacgaattccccctcgagcagcttcggctggtccgcttacacaagggttgaattttctccccgatcgagtccgtgcttttccatgataggatggacggaaacatgaaggattggaatcaggttttcccatctgttgagccatactacagggcatcatccatggaactagggacacccaacacagagcgaagaccacgcaatctctgcttcggaagtaccgattgaagaagtagagattagatatagtacacagccctccccttgcagggatgttatagtctcgttctagccatttgtgttctttgcctaagttagcttactcttgtcatttatacttgcgtcaatttcaccatactttcgccttacagccccgttattttcccccctggaactatattataagtccatgcacgatgccacgtgtaatctttgtaagggacctggggcaagggttaaatataggtagaggggtgaacattcataccccaagaccccaagaccccgagaagctattggctcgttctccctgggaaacacatccatgggcacataagagcttggggctttcgtacccgaataacccgaggtgtggatccacggctgatagatgcccttccgaaacagccttgggggggaccggcggtccacgcgtccgtccacgggtggtgtagctgaatcagtggagtgaaactaggatgcatccatggatcgtctattgcaattatttggaaccccacggagtaatttcctggtcgaactacggagtaaatatacggagtagtactccgtactccgtagtacaattgaattcatcgagaaagccctggaatctgctcaggtgaaaatgtgctcagtctgtttcacacgtgcatatttcccaaattctctttcctattagcgctagttcgagattttccggaaatgaaccgactattagagtttccgttggctttttttttttctctcttccacgctaagactgcggattcctctatctggactgtgttctgctaggccactgcgttgtcctgtaatccatacatacaatatgtattaactatttgcttggcttccgtcaattaacacagaaaatagctaaggcgttggcggtgaatgagcttgtgcgccgtccgtgcaataataagctgtgataccaatatcattgcgtatatagggaggagtacaacgtaatttatacactcacagaaagccaagtcttgttatttgttgtaccacccctgaagattatagttaggaactatgccgacggctgaatcgggtaagtggcacggataatgatctatggatcaaggtcaaggtggtttgtatacaatctacttcatatttattccctttttttgtcagggtttttttattcgccgagcctataatttatattacggctctatccctaattcaaaattaaaggtatgatgtacacggtccctcaaaagaccaatgtctagaacgttatgctcaacgcctttctgctaggctaacgtggcttgctttttcacatgttcatgaatactaaacaccaattgattaccatagcttaatagttcaacaaccgcggcggaaataaccacgaggagatgatagccatgattgtgatacgcgacatgtctataatttccacgattgagctaccgacaggggtctcatccttttggggggagggggggaatgcgcatctagacctgtatggctcattagcctctagaaaaaccgtcgactcggatgaatatcaatctccaaaatagaatattagaacaggtcgcacgcccttgttcttgctttatttgctcttgccggatacaggagcgacgaactgagttgggctggaaaccatgcgattcgtttatcgctgaatatttttaatcggaacgctttttcccctaataaaacactaatcttatttcctccgataggggtttctgatattttcttgattttatttgtatgttgtatggttcccttctatgatcgtgttgttctattcaattagactagctcgtggatatgaggcttagcatgcgaatccaacgagaggatgtcctcgaagaatcaattgagtaaaaattggtgattgatgtccaaaaagcccacttctccagcctatgtatgtccccggtcataatccacgcaccacgtgcgacttcacgttttacactatggacgagatatctgagccttgttaggcataatatcaacttcggcaacccaagaaacgtggccagatttaataacagacacaaaatagccaaagattatggcattaacaactgttcgtgtgcacatcgagtttttaaggttgagtcctgaagccacaaccggttacataccgggttgtgcctgagctagatcatgaataccagagcaaagtgatttgtcggcagtaaggacgagtcccggcatttctaccaatccaaactagctaaaacatctcgtttctttgctgagatggtaggcaatatccaaccgcgtataagcgtataacaagagcacaatacaacaaaatcccaaacagcatgcagaacagcccaatcaaaccacttttcacccaaaccttcaccccaatcccgagcccctagaaacgcacctcaggccgaataacaagcctcttgtgcacatatggcggaggaagagtagtatatctcacgcaaggcttgcacgggagtttttctttcgaggaaaatggcaaacttgggagatcgccaagatgtagactcagaatcgacgaggctctcttccgatcaaagattcctgatttagagcctagtgtcgaggctgagggagttggtgtatggcctggcgtatgctgtggcaagcaggagactgttatcagactccgaagatggtagaatgattcttcctcttcctcctcctcctcctcctctttttcttctggttgttccagcttaagttcgggtgctgctgatgggggctctgctatggcggcagccactgatgatagggcgctattgctcgatgtgttgctcacggtagctgcaagagcagctaattgattgatgatttggtctgcttcgtcgtggtgtcgtgttgtagtcatgattatcccagtttgatgaggttctttatcttgggatttgagttcttgggacgtagttggggaagtggaagatttgttcgtgtctgatcttcgtcgtcgggtccatagatttcttagcagagggagaaacatggtaacgattaaagaaaccacttaaaaagagatgtcagcttgtccagtgtctagatatgtcctcggagtacgcacagttcaagcgactaatcaatattgaatttatcagttatccaaaatccttcaaatctttaactagagatccgatgtttaaaatctagggttcccttctaaacctcagatatatatgtcctcggtcaacgcacgagcttgatacaatgaagggattcaacgagcaagactccgaccagtcggtgcaatacaaaccagactggatctgaaacaccacccagaatccgggatgatcagatatttcccggaagactaggccgttagaacttcatgaatatgactggatgagcttaaaatgtggattcggagactagtactgcccctctcgtttaggtgcatcaatataaacagatcaacatgcaagcatcctaccgtacggaaagaccctaccgaagagttgatagatcattccccaaattggagtgttgcaaacggatagattagtgcggatgtgtatcccgtagatcactatggcaccacattgccacaaatattagattcgagtaggttcgagctatcttgccccgtttgtggattgagagatgggtgggtcggatcgttagggctggtttataacggggccggagttaagattaccagggcaaattaaaccatcaaattaaaggatatgtgtccatattcttcgaatgtcattgcggaccggtctatgacatacttcgaatttggccatggaccgaaatcgtaatatgacctaagcatgcaagccgagtcatagaagcaaaagcaaaagcaaaggcaacagaatcactccgtcctcggatcccggaccatgcagtacaactaccaacaatcaaagtcagcaacaacccaaacagatacgagccccacaagcaaacactaccaaacaagtacaatgtacataccatgcaagcatccaccccatcccgacactccatctccttactcatgtgaaagcccatacgctcatagatcgccacattaggcacattcttcgagctctcgaggtaacacttgattccctcctcatccgcccgtttcgtaacagcctcaaacaacaatctcccgatacccatcccctgcgccttaggactaacagcgacaatattacagaaatagtacccgcgcggatcatcccagatagaagcctgcgcctcagcctgccgctgtttccagatccagtacctgttcgtgcgcagcccgccgcggccaaagtaccggatgttgttgagcatctggctgaaggatagggcccatgattggaaccaggagtaccagctctctggttgcgcggcagggtggggcgctagccagcaagagaccccgaggattggggctggggttagtgtggtgctgtgggatttggagtcggtctcttgggtttcttttgcaacgtagaagagtgcattcttgattccccaatggcagcgtgctgcgagagaatcgtagtttctttgcttgttgaactatacgtggagttatctctcaggagacgtaactgccggccaagttgaccgcgtcacgagagagatgtatgttagtctgataataaggagtggatatatgtctttcttcttttgcttttggtagcgattctcaacgcgcgacgtaccttggatgaatcgaaggcccacttgaaataagggtcgtctgcaaatgcctgctggattatctcaataacaccggggatatcagtctcggtaagaggcaagacttcaacagccataatggcggcttgggaactctgtatggcgggtagatgaccacaatttaggcaaatcggaagagataattgaaggagacaaagaaaaagcaagtcatggcagttggggaaccagacaacctcgggaatgtggagagagttggatgcgccttatcgctgacacatcagttcttatctctagccctgaagggctccagtgccagtttttatgagagtcgggatttcctggaaaggtttgataggtttaatacttgagatcattattcagtttatcacatgtatccatataaggtatctgactaaatgacccatttcgccttttgtccccgatcaacctcggggaatgaaagtccagtatcaacaccagccaaaaagtatagccgttcatacatgaatcataaacaaagtgctattaaatggaaagaatataaatccaaatataacccagagaagagaaagagaagaagaagagcccaaactcagatctgaagaatagatagcatagctggaaaacatgtgcctgacaccaatcccaatatgaacattagcgtaaattcatgattcagacctcgtgacagctttcttccttttttagaaaaaattaagaatagcagtattactggaaatagtcttcgagtcgcacccattcgcggggcacgtccatgctgcggttgacgcgtccacccggcgtgaggggtacatcgacgcggccacgaccgcggtcatcgtcttcatgctcttcatagaacgataaacgggagaaataatcctcgagaacggcctcccggtcgtccccgacaatggtatcgtattctggaggtggggtgacaagcggtggcgcgggagggacgtcctcgaaagcggggggtgcgtaggagggcgcacggagcagatgcattgggcgaggtagggtaggtgtgttgcggtcgtttggtggtgttgcaagatgtgcttgtggaggccgggcgagaccgccagaatcgttggtgaagctgcgggagaagttgtggcctgttgagccgcggcgaacgatggttcctggtgtggggcggctgtcttcacgatcggatgatgtcgctggggcgatgacttgctctcgaggtgcaggaggtgcgccggggcatccgcattcgaattcttgggctggggaaacgggtacttcggctggggttgtgtaggctggtaggtagatgttggcctgcgtggccttgcaggagaggatgtggaatggcgagtctatggagatttcgaaatgtcttcgtttggtggggtctctttcgtcgatcttcgaaagacggaggacaatctgcgtggatcgattagtatcattataaccaaagaaagaggaaagacttgacatactttgatccagtggttgatctgaatgttttcgtatgtggtatcgaaatgcagccgctgaccctcgtccctgcccttcatttcgtggcaacttggcaattgcacgttgaattccatctcagttggaccgacaccagaatcattcgacagattgcctagcagattcgtccgattccgatccacaacctcatccccccttgcagcagcagcgcggtggtcccagtcgataccgccgcctgcagtgacacgcatggagctgccaggatacgtgctgacactagacgagtctgctcgtttttcgaaaagcaacaccttcttcgctggttgcaaccggtgcacgctcttgtctgctgtccagtgctgaatgttctccgtcacaaagaccttgattcggtggcactctactttcgctagcggagttaacttgaacgcaattgggatctgtgagcccagcgggaaggacttccccgagatgacgatgtcgtagtgaagttggtcttcccagttccgcgaaatcgcaatcggctcgacttgctccaatgaaccctcggcaggggtacggatcacagggatttccatggtaccgaggagatttggtcggaatgcgcctgatcgttccaccattgcttctaggtcgtatctcacagagcccagatccgttttgattgtctctggcaatgatccgtcgattggaaactcgaagctgtataaataatcgcctacggggaacatgcggtaatttcgctgtggctggggttgcgaagtcggaggttcgttcttgctgaagctgcgtgaatgtccgtggttggcttgtagagaaagacgtttgacttcgcggggtgttggtagggcgagtgaggcggtagaattgcgattggagaatatatgtagttctcgagttgtcatcgtcactccctccttgcctggtacggacgacaccggtttggcatgctgatagtaatgtgcgccatagtcattctgcatgagcgcggtgtcaccgtgattgaaatagaccacaccatgtgtgacgagatctttcttatcatggaagtggatcttcctaggaggaatacctgaacaatgttagctcatgttcaggtacaatttgatgctgtagattctcaccatctggccaatcggtttgggcatggccacggaagcagatcgagatcttcttgatcttgacacatttggtaatcttcaaatgcatttgcccccgcagaattgcagactttttactgcttgggtcttgctgatcataaccctgcaagaaaagaacgggttctgtgagggcaatcccgacagaaatgccactcccagtggctacaatcttctcatttcgcaagggagtaaatggggtggtagaatcggtattcacggtatggggttcatgtactgagcgaggcagcacctcggtggacgatgaatccgatcgcatctcgtcctccaagtcgaccgatatcggcgacaatataatctccgaaactggtcgtacactaagacgttgcgaaggcgcctgaactccagacgaccgcaagcgaaggaatcgctttgcgttctcacgtgggcgcgccagctttttgaagattgagtcccgacgactccgtttagggatctgattttcaatacaaaccgtgtggcgacgaggcgagcgagtgatgagattggaaattgatactcctagcgatggagttcctgtgaactccgagggccgagtggggttgctagaagccgaccgagaagataactgcgctggcagaggaaggatattagcacccatcatgatgttatttgtctgctgagcatcgccgaataattcccaaaattgtacgtatatcccttggatacgcttgtcgccaaattgggcaaaacacaagcctggtcttccaacaagaaagggaatacaaaagtgcagggaatgtgttagacagattcaacataccttggatctttaatcttgtgagacgatgttttcttttttttttcgtcccttgaatcctttcacgcaaggagactgatctttgtaggaggatggaattctcgggggtgctgacttcataagcaatcctccactctgatcatcgtgcagatctctatttcgacgtgtaggattggctgttatagtgcggaattgtggctccttttcccttttccctttttccttgatctctatgactccgctcacaaggcgtatgtggcgtcgtatgtgattgaaaaaggtccgtgaatatagttagaaaggcgaactacttaaactaaaaagagtcctgatccacggaagcgaaaagaagaacctgaaaagcaaaatataaggtgccagaggagcagcataaatccgaactcgatgacaacaccattgagaaagccggggggagagacggagcctggtctcatatccggcgatccgggccatacgtctctaccatctacggtttacggattttgctcggcatttctgtcaatatttgtggagaaacattccattggggtctagagttataaatgcctcggatctcacggcctatacaaacggcttcacggattcacggcatagggcagtgctagcgcccagctcttggatatcttggccttgttgatctacataacaacttagaaaactgcatctttagttgcgctttaatcactctttttatgactttatttgatacgtttaggactttacaccagatcccatggattttgaaaccataacaaatatgatatgaacctagacctttgcatttcttaaatcctcgtatatcatcctccgcatgacttacttatgatttccgtacatggctagttactccgaagttgactaactacctagttagttagttagttagttacagtaactcgttcagggcctgattttcaaggttcactgcacggcttacacagcttagggcttaggtggaatgtgaatggtcggaagatagaccccgataaagatggtgatcagttctagttcgtcaccatcacctatgtgctgtacatcgtaggcacatcagactattatactaaatactactggcgtgacgacatgtccatcttacgataatgacctcatccgccaccttatgcctagactctactccgtacatatataatcgtatagagcagatctatttcgggaagcaaatgccttcgttctctctggggtgatcgccctgtggacttctctgccctgatttacttccccacgagccgcgtcgatcttgaactacgtcactagacgtatagactacatagtatatttagtggcctagggatctcttcccacaactatcttgtaagcacgtattttcctagaacccaaatcaggcacagggaaacacggtcccgattcaaatgtcctgtcgcacaacgagctctgcttcaccactggaagggttcatgcgttcggtggaggctgtctaggagctgtgggcctggatcatggtggtttcactatcttctttcgaagtgtcagaactttccttattttttaaaaaaggtcaaaagacattgattctccatgaatcatactcctaagagctattagctaataattgccgtatgtatcattaatgttccacagcagctacccagtcagggggagccttgaacctgagtaacaacagatccacgtacctagttcataataatcaatgcttccagtcacagaatcagggcatatgccattagatttatgcttagtaccactagtgccaaacgcgaacgcatgcagctagctcataggataccttttccccttcccccaactcccccaactcctccactttcccctcactagccgttgctcttatccagactgtatcaatcccaatagtgtgcccctcattttcatcagttgaaccaattatcatccagctcattacatgcgttcatcaggctatccccttccagctgattgaagtccccattattctctccaaaattatcagtgtccatgaacaaatcgtcgaagtttgattcagcgggccccatgaaatcctccccggagttaccctgtagaaaattgccgtcatccccttctgtcttctgtaactccatatcaaatgcaccaccactagcagggacatccgaagtattccccagaggttgagtcgtgcttaacctgtccgcaccaccagcagcgccggaggctgtgaaatttgacccggataggaaagcttgattgcccatgtcatcatcgttgaagtctaagctaagaccaaactcgtttgtgcccccagcgttgttgaggactgaatcaaaagtgagatcttcattgggtccagggggtgattgacggggagcattgttatcgctctcatttttgacaacgacatcatcgcctgattgggtgtcgggcttgatctctgccgctgattggctcacggagatagcttcttctgatttaggcatagtttcaagctctgtgcccatttcgactttctcagtcgggggaggttgaatgtcaggttcaacctgttggttcacatcgctcattgtcacatcttcgacgggctgaggagcggcactagtggccttgagagcctcgtaatccctttccaaaaaggctttcgcgatgaactgcatagggtcagaaatgaaaagggaacccgaaaaaagcaacaaaaaaaaagcaaaaatgagtatatttgagattgttgatatttactcacaatttgctctgataggttatccaaggcattttggaagctatcatgatacaacggaatggatcgttgcagattgattcgcgacggcatggagccagacttgcgaaacaaacgaccggtatcaatgagctagaaggtgtcagaggctatatgccaagagtgatgttccagagccagcgcttaccgtccgctctattatgcttgagagctccgtaagggattccgggtttgaataactagttgaatagctggccatggttagaatatgggaatgtgaagacgagtagtgtagttttccaactcggacgatatacaagttgaaggaagaacttgggagaagttaagaatttggggagaccggagagtaaatagactaaacccattgaggtaaagtgtcctcccccccacccctagcggttaacttcctccctttacctttgctcttctccagttccttttttttctttctgtatcctcaacttctttccagttccctttttcctttttctcttttctttgtttggctttcccctgtaaagggacttgcatttggttttcttcaagctttctcagcctcttttttgttgggctttctacccttccaacgcgctttgtatcgtttcaaacaaatctccgaccgcagctttatcaggccacagaaacatctcccttattctaccggagctggatcgaaaaaaaaaatccaaaatccaaaaacaaatccccccccctcaactcaggttccatctcggtgtctctgttactagcactgtttatacccggtgctctttgtttccccatcttaggaatctttcttattggacttccatcctggtcccccgcggcctcctataccacgtatatttccccggtcttatttgcgatagtggctttcggcgacgctctgcattgtctcaaattccgaatttgacagatcataacactgggctctcccggtctgacatttaaccccgtccgacttccgcatctttagcttcctctgatcgtctttgggatatatccgtatcttttcaaaaagcaatcataatggctgaaaacgctcaagcctcgaccccctcgtctcttccccccgcgcctcaacccgctgtcggtcaagcccaacagtacgatgctcctcagggcaatggccagggcaaccagtcccatatgcccccgcccccgcgccccccggtgataattccccagaataccaatccgattcccaccgccatgacctctcccatgtccggagttgatatgatgtcccccacaagcgctggtggatatgtccgccgagcggctcctgaaccaaacaagagagccctgtatgtgggtgggctggacccgagggtcactgaggacatcctcaagcagatctttgaaaccactggccacgtggtcagcgtgaagatcattcccgacaagaatgtgagttctcctgacagacagcccccctgcatatccgccccctgagttgttggaaatgctctctggagctcttatctgggataccattgctagtccttgatggaatactggttgctgactgttttactcattccaggggcaattcaccaccaagggccacaactacggtttcgtggagttcgatgacccaggtgcggccgagagggctatgcaaaccctgaatggtcgcagaatccaccaatcggtaagtttcctttcgttcctggtattctgtggctgtatctaattgcctcaggaaatccgtgtcaactgggcgtaccagtccaacactaccagcaaggaagatacttctaaccacttccatatcttcgtcggcgacttgagcaatgaagtcaacgatgaagtcctgactcaagcattctctgcttttggttcagtatccgaagcacgtgtgatgtgggacatgaagactggtcgctcccgtggatacggcttcgttgctttccgcgaccgcgcagaggcagacaaggccctcaactcaatggatggtgaatggctcggttctcgtgctatccgttgcaactgggccaaccagaagggtcaaccttcaatctcccagcagcaggcactggttgctatgggcatgacgcctaccactcctttcggacaccaccacttcccaacccacggcattcagagctacgatatggttgctcagcagactccccagtggcagactacttgctacgtaggcaatctcacaccttataccacccagaatgacttggttcccctgttccaaaacttcggctatgtccttgaaactcgcctccaggccgatcgtggctttgcattcgtgaagatggattcgcatgaaaatgcagcctctgcgatatgccagctgaacggctacaacgtcaacggccgtcctctgaagtgcagtgtaagttattgctattcctgtgatttcccggcttatttactcactatcgcagtggggtaaggatcgtcctcccaccggccaattcgacaacttttctccccagcagggcaacgccgctcccttcaacaacagccctgccggtttcttcccccaatacggtggtcccgcgaaccccatgaatcaaggtgagcctagtattcgtcgtatctctcggcactcgcttactggtgtaataggtcctgcccctgctggtcgaggctgggatcaacaacccaacaatttcaatggacctgctatggctggccagggctacgcccaggcaggtaatgccgggggctacggccgtggccaagccatgtccccgtccggcaactgggaccaatccaccaacttcaacggaggctaccaggcgtagctcgggttttgacagtctccagtcagtctgctcacatacgacacttccggcattttctcacagaactaagtttatttaacgtcctttctgtgtttctttccatagcacccttctacaattccccatcaccgttgatattttctttcttttacctaaattgagtggattttcaagcgagcaagttgcttttgtctgaaacggaatttgtgtgttgcgcaccccataccccaagtccactatgttgatttgatttttctctttacttcttttttctttttcttttccttaagcgtgccttgctatcaaggattctttggacttttgttggctccgtcacgcccccccaaataaaagcgacctccctactcttcacccgcgtatttggactgttgactgtttgttcatttcatttctctagctgttttatcattcgagtacatttgttgtatcagatttgcttccctgtcttttcttaggcttgctttctttgttcgatactcattccactcaaaagatgcttttcatgggttgccatggattcctcggttgacacattggtctgggcactttcccacgagtatccgtatatgctgtgatgaatttctttggagcacgcgacatcattgatcttttttctaaatatctctgccttgctggcgttctagcccagataccaatttgcctttttttcccctgcattttgcctttccattgctttaaactcattgccgatggcactttctttgtttatttttatatatactatgtatgatgtgcagagcagacggcggattgcatgatattatctgcctataggctcgcagtgaaactaaatatgttgtgttatgctctgcggggcatttgaagtcgaaccggtttcatagcagttggtatctcattgtagcgttggttgattggtaaaaccgcaacccttctcttgctgcacatgtatgcagtgtgacaatcagatgtacggcatgttttagattgggataggcaatgtacatgctccatcctttttctattcctctgaattttctctgtactcaactggaaaaccgggatcggatggttatttactaatcacgaagctataactccgtacttatggatatatgtgcataggtattccggctttaagtattctatttactctttcaattaaaagacaccataaaagacatgaaattaaagcctctaatatagtatcaagactttgcagcattaccctctagccgtgagaaaatattgaaggtacatactgggaaggcgaccgagttaagggaaagtgcctctcaaattgatgataagatccaatattattatataaattattttactccatatcttacctgttattgctgatactttatatgcactagagacataattcaaggctatttgagcgtgtgtcgccgctggcatcgcaatattgatatacagttacattgttggtgcctgagatatagggctacaatgccactcctttacggccctgtgcaggtaacattcatggatgtctttgcaaaacaaaaacaccaaacgagaaaacacagattccgagtttcaccaagcaagaggattgaccgagctgacgttccagctctcggttccactcgcactaatggacgatgacgagagaaccgcggacttggcggtccacgaagtatctcctcgcacgcgatcaggcagcgtaagtagcggccacaaacgaagcctttcgggttccctcctctcgagactttccttccttcgcgtgaaccaggtagcacacacctccctggaacgacaccaccccggtatggatcacgatggcgacgaagacctccactccggtatgccgcagaccacaggcaagggaggaactaccagcagccgggcaatgtctgccgctctcgcacaacaccgaacgcgccgtcggcgtggttcactccgcaaaactgcattgctaggcaccaggctcgaatcgcgcgacaaaagagccaccgccaaagccgccgaagctctcgaagccctccgcgccgaacctagccgacttcctgccgccgatctacaagcggctatacaactaacagatcaaaccccctccgataatgggcctacgcgatactcaccgcgcgagagcggggccttcgacgatgaccgcgacgatacccaacaaccggcctggttcagcgcggcaaatacccagaaacccattcgaccctcaataagtcgccgacgccagggcctagcacagcaaaatctccaagaacaagcgaccgacgacgaggacctcatctccttccctcgcctgcactcaaatcccacagcggccgacacgggcaccagtcctaaaatcggctctgcaactggcttgcacatctccccgccatcctccaactcggcttctttttattcgctccaacctcagcccgaaccagcatacctgcccgtccaccgacacaagtcctcgcccctggtcacacatccggttgagatgaagagcagtcccgatgtggacgtggactactccgagaccgaatggtggggctggattatactggttgtgacgtggctagtctttgttgtgggcattgggagctgctttgaggtctggagctgggcttgggatgttggggagacaccctatgcgccgcccgagttggaggatgatccgactttgccgattgtcgggtattatcctgcacttatcattctcacggctgtcatgtcttgggtttgggttgttgtcgcatgggtgggtatgaagtacttcaagcatgctaatatatccggggaggatatttgattttcttctcttgttccagcgcataccatattataatacccttcttcttgtgagcgttaaatggcataaattccgtggggttttgtggttggctgacagtgttgacaacattcgatggtcaatacatatgggctgcgcaaatattgcagctatattgctgccactgcactatcagtttctggacatgagcgacaaagaggtataagcatcgctggaatttttcccagcaaataatcttgttgtcgtggcctcatatgtacggccatctagtctataaactatgtacatactgaggggcatgtataaatcacaaatttgcaacgtccaacttcctcaagcgcaacatactatcctgcaaagaagtcgctagcaacgtcccatcagggctccaaagatgactctcatgcgtccccctgttctccgtagcccgaggtgtccaaccctcctgcacaaaccacttcataggcaactcactcagaccgccaacaccgccatctccaacactctcccaatcaatcatccgcagagcctccccatgctgatgcacaataaccgtaagtgtaagactcgccatctcagtccagtgcttgatccccagcgcgcgcggaatcaaaagaagcgagtttttatcactggaatacatatgcgcacacgcatacaaattatcatattccccgttctcttctctctcgcggatctgcgccaaactcgcagcagggtcctcatccggtgatcctttgagccggtactgcgttagctggcgatatcggtcagggtgttgcttgacatcctcggtgcggttataatccttcatatcagtcttgcgcacgtctagaccgggaaactcgtgctcggagatgttcccctgttgcacggcatcgatccaccaatctgcgtccacgctgggactgggaggctggtcttctggtcgttttgtcgagaggattgagtcgaagcgcgcttgtgctgatttcggctggtgctggaagagacgctgcttctcatcccgcttgaaggagcatatgcacgagaagcagattctgcctgcttgtctcgcgtcgacggctcgtgcgctgtacatgaatccatcgcggatatgtcgcactgtgtacacgtacggcgtgtcgagccgtcccgctaggatgaatgtacccgtcatatcctgccgatatgtcagtttgaggttctttgagggaaattcatgtataatatcttacgtgaatcactaaaccccgaccgacggtcttggacgctgcataggctgcttgggcgtagacatgtccgccgaacgagcgcgttccttgaccaggattgaaaggtattgccagcgagcgaaaccgctcaatcttctctggtccggtggagtcgggatacgagatcaaggcatcttcgagtcgctgcagcgacatcaactcggtgaaagaatgcggggaagtcagctcgccgtcattgtccggggccctgctttgtggagacatagcgcgaaagaggcgagaggcggtttgatttaggcccttttcttcccaaagagtacaagtagtgtgaagcagttgcttgtcgacaagggtgattgttctgcgggctgatggtacctgtccgatcaataacaacggcctctgagcggtcgtggtatatgaaagtaggattaaggatctgagccttatacagtattctgttctttaacggaaaacgggtaggattgtcttgtggggagtagaggtgaatagatttgataatggatgtatggtgattggtaccgagtacataccccggactaagagacgggaccggccggtgcctcggcttgtcagtttgactcacgaccctacaataactaaatagttcctccgtagttagtacaaaatagggtgaatgttctaagtgtaaatatttcgcataaagtaactcattttatggcttctgaatcgattatctatgtacatatagcatgcttagtccaaattcagcgttcacgactgatcgggtgaatacatttcggctggagcgctttgcttcaggtttacataaatcgaaccatggtggcgttcacagggtacggcatgtcgatctctatatatacgttgggttcctttgccatgctcgccgttgccatctttcatggagtcaagaatggagggaacaggaattgtatagtaacagccacaaaatagacttgtagatcaaactggtattttatacaatatgcgccgattttgctgataggttcgagtggcagttccctatgcccgtgccataataatacaaagaacaaaaaaaaagtgctggaaactaaatgacgctcccaaatctgatatcaataatcaaccaaactttcgtcgaaaagatcacgtcgattagatctgctcggtaatggtggaaacgttgttccactcgaccttgccctcgatatccttgatctcttcgagcttgtcgccgagtttgaccacggaaaagttgatcatacgcgggtcgaggccgagagtacggcggatagatgactgaacagagccggaagagtcgaagcgcatgatgaagtgatgaccttcagtgtatcgggcctgatgttttgtggtgaccttgggcagacggaaggcaccccagttggtgtagccgcgaacgacgccaccggagcggatgacttgggtaccggcattacgggcgattctgcagtaaaatcatctatattagtattcgacaggttcggatgatggagaccgcggcgatggtgttggttcaaacgtactctcgcacctcgttgaggctgcccgggcggacctgttagcagagcggttagcaaatccaaacatttctttgagtgtcaatatgacagtttcgatggaactaaagcatacaatggcaattagctcgtacaacatggcatcgagggttggcgcgaactagagacagaaatggagcaatgaccatttgaagccagcaaaatccgacgaggttagcgcgttgcttatcgtagtcttggcatttcgttatcggggaaatgccgtcaacgaaactccgccggagaagcgcatcaccttctttcccttttacttaaactctctcctcttctcatttcactttccacgcttctcattccttttccctatacctcaaaatgtcctctgtcgctcgcgcaatccgcccctttgcttcccgggtcatttcccagaagcctcttgcatccgcctgccaggtttcgcctgctttccgtttcccgcggggaactaggagcttctcccaaagccctctctgtgagtactatgaacacccaatgctgttaatgctgtctaggacgatgtaaaacatacttggaccggcattggagcatcaaaatttatcaaacatgctctatgatgttacattttactaacggcgcaccaattcgcaattatagcccaggtgaagaagtacacagagtcgcacgaatggattgagctggccgagggcggcaagactggttagtgaacaaccacctcgatcaattggtctcatacacctgccttccatccattgaaccggtgccaggtgtatatggcctccaatagtatacagaatatggagcagcgagctaactaacagactctctacagccaagatcggtatcaccgactacgccgcccactccttgggtgatgtcgtctatgtagagctccccgaggtcgacctcgagatcgttgccggcgagcccgtcggcgctgtcgagtccgtcaagtctgcctctgatgtcctctcccctgtttccggcaaggttatcaagggtaacagcgtcctcgaggataaggctaagaccatcaacgagagtcctgagggtgagggttggatcgctgagattgaagtcgctgatgctgctgagctcgatgcgttgctcgatgaggctgcctacaaagagactatcgatgcttaaatttgtggagtgattgatcttggttcgtaatttataaatgcctgtctggagctagatgtggtgaatttcttctttaactgatgttatgttgtcatgtatgaccaatggtgaccaatttccttcaacgagagcgtttagatcttgtcgatccgtttacggatcgacgaactattcaacaagatttctgtatacgtggacggatagttgttttatttccttgtagagaaaccatagtccatatatctaggtggatgtatatttagagctagatcacgcatgtcgcaatagtggaatgcaggtctgtgtacaggaagatgatatcatgtatgagaagcattacaacataagttatacaggaggtatggattcacgacagatcggacattggaggcgaagtctcatccagctttccagacaggcagtgtggaatatatgacgacaaggagtgaccatatatagccggcgactcaagatgcttgcggccccatcggtgacgctacttccacccgaagcagaaggcgcgggaaggacaggaacctcgatatcctgcatgcaaatagcacagtcgaatatggccttcttgcggtctttccgctgcttatcatcatccttcgaatcactgactagatctcgttcatcaccgcgcagggatgcaatcgacagaacgccaccaccggcttcgagatcctcgtccgctccggataaatcgcgcagcatgggatggtaatcgtatgcatgcggtgcccagccacgaggcacaaagaagcgtggcccgagaacgtcctggctgaccaggatccatgcttgaatccacacccatccagtcatgatgaatgcgcttgtatagtcggggcggataaacaacacgtttccccgtgccgtgaggaagtacaagaatgggaagagtcgcagaacactttggccggcaacaaagtcccaccgaagagccttgcggcaatttctcatcgcgttgcggtagacctgtggaacccagaaggagagatagactgctgccaagaagcgggtgtatattgagccgagacgtctcggcaggaggaaagcccagattgacaggatgagcatgccaaatagggtaagatagaaccgtgcgtacattgttcctacgtcgctgcggatttgccttggagttgggggagtggctcgggtggttggcggcggcgaatccatctcatcgtcgggggcatcttggtcgggtgacaagatgattggggtcgctcccgagtctcgtgcttccgaagcagtggcaggcaaaggcaaagttccagggcgagttgttggagttgatggattgggcggacgatcttgctctcttctttctggctcttgcactgcccatatttccatcatgaacttcattccaatataactcaccgacaggaacgccaaaaatgatgcagtagccaaaactaggaaagatactgcggcatatagttccaaaacaatgaatgtcaaaacaaatgcatcgccgagcgccatcaatgcgatggtatagaagctgatccgactccgggtagaaggagtcgaagcctctttgatctgtcgaagaagcagggtgatctgtgcaacaaaaacaccagaaaccacaaaaatgagacgagatgcatatttactgtactcttcatgcttaggcccagtcacatataatgcatcagaaggaggaaactcaggggttcctttcgtttgaagtatgtacccgcagtctggggagaagacaacagcagacatgaccataagaggaggatctgggattggcgctcccataggatatctgagctcttgctccatacgctccaataacaatcggtcagcaacggcatcttcgagcatgactggatgctgctgcaagtagatgatatgttcacatttaggcgcagggaactccatctgctctgttcctgtcagagaggaccaggggaacagtgttgggggtcgattttgcttctccgagatggtgtccgacagtgacttgagaagaagctcgtgtgacaattcgtaagtgtcagaagatagcatgaaatgcggcaacgagaagatgccgccaaatttctcactggaagtagtcaaaacgatacttccggtgtctgggaagtgtacacctaacaacgagatgtaccaggtacttccccagaagtcctcgctctcgaccgtcaaactggctcgcatctctctcaaaagtccatcgcccatctgaagttcttcaccacctccctcttcaagatcaaagtaaaaggtgccgctattgccagtgatattatgactgaattcatgagtaaagtattcgtgttcttcagcgatggctgtcgtgttcagaggttcacggcgatgaacaccttcagttcgccgaacccagtccccccgcagcttcccggttgagttgcgatatatcggaagcagaagcttggtcaagttcaaagtaggcgagacaatggggtcttctagaccgtccggggattctagcccggcatttgagaccgctgattgtaactggtggcgagccaggcctttgacctgcggaaaaaggtcccaagcatagctgtcattccctcttgaacccgaaaaaggaagccatcgattggcgggcggatcgaagtcgccatattttgatccattcaataaccgaaggacctgtcgctcatggtcaagctcacgttgccgtgcccgatcttcatcgatcaatggcggtcgagactgggaactgaagagaaggtagaacaccagcacgaagaagaaaaaggagccgcggttatccatctatgccacgcagtctcggcatcggactcttttctcaaagacagacaataagcatcgcgataaagagaaaccaaaaaaatgcgagaaggaggcggggagctcggctaagttacagagggaacaaacagaaaagaactaatgaatgacgaacgcagtataagaaggtgtctacggagcggagttgatgatgtactcgaccccggggagcctgcccgccgggcacccactccttgctgactcatgacgcctcaggcatgatggatggatcgatatcaaccctggaaacgttctacttcgggatttataccccgtaaaattaaaatagagatgaacaaattgtttcttatctgaccattcttagccagaatttagaacagaccaaaaagataaaaaatgccaatgcattttatggcaagaattgtccactaaatgcgaagacccgaatgcttgatatcaaaccggttgaattttggtacaaatagaaaaacgcatacacacaacgaccatctcaatcataatagctctgctttatgatgcagcagccaggacaccaccctcgggcttcgcatcccgccgccgacgcttctcgagaatggcctcacggcgctgtgcaagcatcttcaattgtctgctctcaacaccctgaagccagtaaccaaagcttccaccaacaccggcgaagagaggatagacccagagggattccttggcaaggatcggacgcatctcgataccgagttgccaaaggcggacggcaatgcctgtcggatcaacacggttagttccaatggcatataaataacttgaacaatcgtgctaccaagcagcgtgctcttgtgatagattgaaagctggggaaggagatgtgacgtaccgaagccgccccagaagagtactttgtgaaccatgatcgcggtcgagcgcggggttgtggttgtaattcgggtgctgatggagatccgagaaagattttgggaaggcggatgggttggctggttgattcaacaccacagcagccgggataattgggggcggagatagatgttgccgtcgcaatagtccaggagagacgaggttgaagcaaatcaacgggccgcagttcccaagcacggaacaaccattcttccggtcacacttgttatcgcttatcgctcgcgcgacttcgacttccccaggccaactatggcttctgatgaggcaatggatgattctacagctaaacggcctattgatattgagagcgtgaagcgcaagaagttcaagaccgacgaccttcccttgtctgcggcgcaacatgcagtcattgacaaactcttacattcattcaagaagaagggtggctttgatagtgtccgaaaacaaatatgggctgaattcaatgacggagtatgatatattatccacatgttttttcgcaccatgctaatcctatgcgaacaggaacttcgaaccgagtttaccaacaagttagtcgcacttgcagagtcagcgatcgatcgcgagccggcactgctgtcccgcgaaagaggaaaggcagcgacactcattgagggcgcggtggaccgcggtgatgtctacaagagcgtggaggactccatcgaccaattagcatccaaacacctggatttcatcctggaatctgttcgtgagatccgatgtcaggacgttggagaggaagtggctgcccgtgaactcgagctagggaacaaaaccgatgcagattatgaagcctacgtcagcgcccagcgggaggagcgggaaaaagtgtggcgcgaagaggagcgcaaacagagagagattgaggaagaggaaaaacgcgtcagggatgaagaacgcaaaaagaagcgtgaacttgaacgacagaaagacgaagaagaccgggcccgaagaaaggaaattgatgaacagaggcgagctgatcgggaacgccaacgcgaagagcaacgaattctcgacgagcagcgagagcgagagcgagaggaaagatacgagcgacgaaggcgtgaagatagggagcgatatcgaggctgggaccgtgaccgcagtcgaactcgagatagagaccgtttccgtgatcgctctgaccgtgggttatcacctaggccccgggattcaaaacacgacaagtcatctacatcgaatgttcccactcctgtgctaccgcctcttgtggatgagaagtcactcgaggaggctgctttgcaaatgctattgaaagaaggcgaagaacttgcagccaaggctcgacagaagcccgagtttgactttgaagaggccgaggctattgagaatggactgaaaccgccagtatcagcgttagggccggccaagactgccaatgattcaaggttttctaatacatctacgagagcggccagcatatcccgagatgctaacacgaggcgtggttctcttgcagaccggggtgatcggtcccgacatttgactcgggatcgaagccgtagtcgctcgcgtcgacgacgcacctcacgttatgacacagatcgccgacgtgaacggtctcgggatacttctgtgaggtctcgagatcgtgatatggatgcgcgccgtggctaccgcgacttccgggatgatcgaggtggtggaagctacagaccaagccgtcgcagccgcagtcgatctgccggccgggaccgcagtgttggccgcgaccgagaccgcaaccgagaccgagatcatgacaattatcgtcctcggcgcagtcggccctctcgctcacctgtacgccgacgttctcgcagccgctcgcgctcgcacccccctcgtgctcgtgaccgtcctcggtcacgttctcgatctactcgacggcgatctcggtctcggcgtcgctcgccttctcctactctagatattgaccgctacgtgccctccaccagcaaccggagcaagtcaccccgccgccgggtccgatctccggagcgagagcgagaacagcgaccccgtttagccgatattgaccgttacaaaccggtatctgaacgagataagggttcgactcaagcaaaagagggagatcctgaggttgacatagaaaaagaaaaggagaaggagaaagaagaagagaaagagaaagagaaagagaaagatacagatgatcgccgacctcttcgacgaacccctagtcgccgaaggagtcctagccgacgaagaagcccaagtcgacgacgaagtcgcagccgcagaaggaaccggagccgatgatttttatgcaactttgccatgtatgaaaagaccagggagacttctgcttacaattagaaaaagattttcgggattgacgccgaaaatgaccgcttttgaggccagaaacggctgcctttacacccgtaactttggaccactacaacattctacacccgcccagcactgttagtcatcctctagccctgatgttgacgctcgacttgtacagttagttgttccccgtatttccaacaacatggagccttcttccatacgtagccttatcatctttcaaaagaagggtggtaaatggttaaactgcttcgacccggacggttattgaagtgagtgcgtctaaacgggcgaggaaagaagaggaaaaaaaaaatagagcaagctcaaatgtgcgatttgactagatgctcaccacgaagcacccgttcttattaagaccaatgctagtgaaaatgaatttatcgcattctattgcggtcttatgcgatctctcctctgtgcccaagactgttgtgatagttttcccattcaatactcaagtctttccttttccatccttcgctcccaaacgccaagcagcaccgaaaagctagcaatagttctaggtctggggcttcagctgttctttcaatgtccatttgtcacatctgtggcccggctggccttcccgctcatcctgtatatcctcgcagcgcctgaccagcagttcaaacagacgttatatttcatccaactgttttgcttcccgcgccctcccctcagttgactctaaatgactcgggtcaggacaaaagtcggcatccatccaaccacctagatacagcacccagcggcctgacattgtccgcgcgggaaacacgaagtcatgtttgacacattatgccacgccatggctgtataataagagacagaccgtgtgaatcagcagatgctcaggacttccctttctagctcgtactgctgtttggccgaccttagactcatgggtaggggcctttacgacggctcccgttaatacagcacgatgccctatagttgatttgtggcgatggcgatccggcttctgtcgctgtgataggtctttcttggagaagacttactatgtagtaaacttagggggtaatacttcaactatgtattcccaagatcacatgcatcgatatcagataagcttatccgttatcagttctccacccaaaaaaagttgaaaatgcccagactcgccaacttccactctttcaagacaaccgaagacactgagatcatttagccatataaaaaatttgtatattggcacgcatccaagttgctaaaccccacatcagcgcatcacaatctctgaaaatctctgctacccccagcgaaccacatacctccaacatcgaaaccatgtcaaacgcaacgataagatctgaggctgctgcaagcaatccctctccacaatctttaaacctagcagaccgcactgcgccccgtcgacagcgcgccagctctattcaatcatctgactccgacccaacctcctcctcgggctcatcttcagaggatgacaacgagagcgaaagagaagacaaacaacactccgaccaagaaatgaatggcaccgaggagtcgaccacccatgcaaatgcctctgatccatcctcaataccccacatcgccggccgcccgaaaccgcgcatacatcgtattagaggcgactcgggacttttgtcgcggctcaacgctttcttgccgaagatgaaagatgcaaatgagaatttgcaaaagcagattgaggctggggaggctggagatctggttctcgataatgcggacgaaaatgcagagcaatatattgagatggtaaggcttattgattgtgcttattgattgtgatggggtttgctaatggatttaggatcttggtcttggggttttggaagagaaacgcgatggtgattcttcgagtgatgaggagagtgatgacgaagggtctaatggtgtcactggcactggggagacccctcaagagatgaatgactcggatatcattgggaagcttatgggaggtaagagtaaaaagttgaatacggacaagccgtctatcgaggagatggcttaataggcatttgttcgtttgatttagtggtgggttgcattatttataacatttttggtggagatgcgcggtcttgattcaatcacgattgacattcatttgcattatcttgggctttgtgttatcatttagcgtctaatgcttttctttttccctctacagaagtggcccagaccaatcgcgtgcacaaagacacatacattcattccctttgtatgcaactcatcaggaatcaagtctagataaacagatatggaagaggaaaataaaactgtaaaacaaaacatgagcatatcgcggatccctatatatgcatgaacccatcatacactatgaccgaatgacattattaaaaagtgatatattttgcgtttcaccatctcgtttcttaggccacttccttgatgcggcaagtccagccggattcctggctcagaagaggcaagctgcagcaggtcagtatactgattagaaagggacggcaaggagtgaactaacctcgcaccaagacaccaacccagctcgttgtttttgatcttcttggctatcttgacctcgcgggacaagggaatttcgtaaccggtgtgcagcagaaccgtcatgaagctaaggtccatacaccattccggacgatcccgaagctgtgcaagcgcattatcctcaccctcgaacttaacactttcgaacgccttccattcactctcaccagcacaaacggtggaggtcagctggttaagctcattcagagtgaaagattccggcatgccaagtggagccgtgcggtcgaagaaataagagaagatgtacaagtcctctcgagcgaaagtctttgcgagagatggctggtgcacaccgttgaaagaacagggtgcaagcttacactcgccgctcttcttcaggatcttctcggcgatagcacggcactggggggtcatagacttgtccttcgggccaaccatgctcacttcgacttcaggccccagcggatgatcagcggggaacttcagctttactgtcttggtcattcctgtgccaatgcaggggttggagataggctgcttaacccaggaaaggtccttggggctctgagctagcatcgcctccacgaccacggtgtttatggccgtgcgagcagacatgagaccgtatcctagatgagagtgttggtacagctcgaaatggcggccaccaaagttgaggtcatacttgtggtcaccgggagcaagacgctccggcataccaccagccttgctctgctcgaatgtgggttcgaagacaatctgagtggaaccgccacccagatcaaagacagcggccgtaggagtctcatccgggccaccaatcttgcccagcaggtagttggttgtaatccaagcgtagacaccttcctttgaaccatccatgatctcgacaccacctctctccttggagacaacggggaaggggtaaacagtctctagacggtgtctaacggcttccaagatcttgtcgctctcttcaggacctagaagacgaagtccggccgtggccttgacggcaaccggagagcacgacctgtactcctcggggaccgacttcacagcgacctccataagagggtccagactcagagctgcaccctcggcatcctctccaaaagagctgagaccggaggagcctccctccttctttttcgtttgttcgaacacttcattctcaagttctggggtagggccgcagttgttgaatcggtatacatgaattcgggacccagtgctgccggcgtcaatcatgagagcgtactgaataagaggcttggatgaatcaaacggcttggtgcatactctcgaagtggacgcgtcactgcttgaaggtggttgctctgccaaataatcagtcctgcgaacggcagcgcgagcaaggggaacaccaaccgttggtaagatttgaagtgctcggctgtgaaggggagagccacactaagaccataaagatgaacgcaataattgcccccgtcttcaagtaacgcgatctctgggtctgtgccatgttgacgggttgtttgtcggagaattgactggacttaatagactgcgatatagcaggtccgtcgctgttggagatggagcggtggcgggtggccgaatctatgtagtcggatttgctgttagggatttgattgtcgactccagtcgacattcgagcagttgtcaaattatgagggtgcagtgacaggtggcgtttgttgctggcgcaagaatggtgaaacgattgtatggggttaagaggaataatgaaacaagtaagtaaccattgatcccgatgtcctccaaaaacaccaagccagcctaagaaaaaaagtggatggatgtaaagagggaaagtctcaggagagaaaggagattcagggtttcatggttgtggcgcagatgtggcgttaaatgcatgcatggatgtacatacaacatagtactccgtacataccacggggaacttccagtatttacgcacaataggaatgctaatatacaatcatagcatctttctcttctactaagtccaaagtaattttccttctaaaatcaaagagaagaaaggataagcaagtaacgtaatgattgtacaattcaatcaagttggcggtgcaagctacatagagtgctatatacacgaaagataaaagaacaaagttgaagtatactcagcttcctagagtgtactccgttgggagagtactccgtacagctcgtattgttagcgcgtatagggattatttattgccagtgcgccccgactcttgaattgagggagcaactcacattttccatgtgtgtattaaggcagctagctgttttagactacacgcgggatgccggatatgcttgttaatgtaatgagccatcataacttggccggaagcatctaacctttcaaggttggtatgtaggtagatacctagtccgggggcagtggtttactaatgtttgttgtgtttgcatcctggatagccatactgttcaacttactccctatgtgttgcaaaaacactacatctctcctcacaggcgagcttgccaaccttctacaactcctgctacattttccgctaccagccgacaatatgaatcacacacgcagtttcatatcatccgcccaggccctacgccagatcttcatcgcacccgttcgcacctccagagttggcattcttgcgttcagtcctcttcagaatgcaccccagactcggttttttcaacaatcccattgcctagagcttcgatcataccggccacccgttgaaaagcccccgataaacgaagctatccgtgcgtcgtttgtccaagttgtgaacgacgaaggtgacctcgaccctcccaccagactagaggatgtccttgaaagctttgaccacaccgagttctttcttctccaggtgcaagaaggagacaatgacaacccaccagtttgtaaggtctacaataagaaagaagtgcgagcacacgaaaaggccaaatcaaagtcagctcgcgaatccaaggttatattcaaacaaattgaactgaactgggcaatcgatgcccatgacctgtcgcaccgcctgaaacaactctccacctttttggagaaaggccgcagggtggaaatcctattgaccaccaagaagcgcaagcgcaatcccacagtggatgagatcaaacaggtcatgcagagtgttttggacacaatcagagaggccggtggaactcagaccaaggcaatggaaggtgaaccggggaagcaacttaggattaccgcacagaagaatatctagcggagaggactgcttccatgtatactatatggcattgaactgtacgacaacgtgacatcgctgtttctcatcactgttatactattctttgggtccactcgcacataccttggaagtagcccggagagctaaggccgttggaactctccgtattgagacacatctattcataaaattgatgtttcattatctccatttccaggctaggtattctgcccgcaattcgaggcctatgattggctgatgactaagctgtcctgagatgggtccattcatcccggaacccatcttactagaaaatttggtgttgacctgggcttcttctttcccatccttactccatctcttttaatctttcctttttgttcttgttccatcgttttatttattgaaccaagatgtcgagcatctctcgttcattgaacctcctggcgcgcactagccggtcctccctgctgcgtccgactaccgtcaaccccgtccaccatgtcttcagcaacaaggtgaccggccgtgggttggccactgctttcgagcgtaacaagccccacgttaacattggtatgatcctgtcgttggcgcataatccatctccacgctaaaaggttgttgcttaggtactattggccacgtcgatcacggcaaggtaagctattcgcaacttgttccgacatttccgccatcttcgaacatgagatttaacccgtccgcccatagaccaccctgactgccgctatcaccaagcaccaggcctctaagggtcttgccaacttcctcgactatgcctccattgacaaggcccctgaggagcgcaagcgtggtattaccatctcgactgcccacattgaatttgcgactgaggaccgtcactacgcccatgtcgactgccccggtcacgccgattatattaagaacatgattaccggtgctgccaacatggatggtgccattgtcgtcgttgctgcgtccgatggtcagatgtacgtcccccggtctaaaaacctagtttgatgagtgtgctgacgcaaatcacgcattaggccccagacccgtgagcacttgctgcttgcccgccaggttggtgttcagaagattgttgtgttcgttaacaaggtcgacgctgtcgaggaccctgagatgcttgagctcgtcgagctcgagatgcgtgagctcctctcctcttacggattcgagggtgaggagactcctatcgtcttcggctctgccctctgcgctctggagaatcgccgccccgaaattggtactgagcagattgagaagctcatgcatgccgtcgacacctggatccctacccccgagcgtgatatggataagcctttccttatgtccgttgaggaagtcttctctattcctggccgtggtactgttgtctctggccgtgtcgaacgtggtctcctgaagaaggatactgaggttgaaatcgtcggtgcaaccgactccggcaaccccatcaagaccaaggttacggatattgagaccttcaaaaagtcctgtgacgagtcccgtgctggtgacaactccggtctcctgctccgtggtgtccgtcgtgaggacatccgccgcggcatggtcgttgctgcccctaacagcaccaaggctaacaacaagttcctcgtgtccatgtacgttctgaccgaggccgagggtggtcgccgtactggtttcggtgccaactaccggccccaggtctacatccgtactgctggtaagttcaatttccactgatatgatatcaaatcgataagggatgctaactatgctctagatgaggctggtgatctcagcttccctgatggcgacatggccagacgtgtccaacccggtgacaacgtcgagatgatcctcaagacccaccaccctgttgctgcggagcccggtcagcgtttcaacatccgcgagggaggccgcaccgttgccactggtctgatcacccgtgtcgtcgagtaaatggtccagtaaatgatccgctcacgcccttggtcaggcaggcgaactgtctgacccttgtattatgaaccctttttctttaacatgttgtttgttttggcacctttcattccacagcgcgggaatcatcgatcagcacgagggatccggggtaaaccggagttttcgcttgaatcttgttactgtcttggagacaaatgtagtcggattttctttcatttctccactcccgtgaaaatgtattcagacaaaattcttcctaaactcatatataatttcagtccaagtcttaagtcaatgtgtacaagatatctcgctgcttcacctcttatttctttatataccatgagaggaacaaacttgaaagctagatacatacttgtagacttaatcgaaatactccttacatcaacgccaaatcgcagtcccgtcgataccggttccaattgatgtttcgcccagcgcctgattgcggtatcgtttaagaataatacaaacgttgcgcattttcaaatacgccgtgcgaaatcagacactacaatcgacactatatagagctgagcaggatttggtgctgatatatggtgctgcggaccttcgcagtacttattaatatgtgatgctacgctagttagttagcatacgattcgcccaggtggtacgctatcataatagaaatccatatacggaggatagtatcactgaattctctcctccgataccggtgcgcgggttatagaatacaatagtatatatcgtgctccgcgcatcaagcatttcatatctttatgttgtatgttgtacctacatatgctgtacgtacctggaagaattttagggcgcattacagtgcgtacggagtggagtagggatgttgacacctctaattggaccatctaattccacatagctatattttcctatcattgggccttctatcaacccacagatacgttatcagacagcgttcgcttacgcagttcactttcattggcgctccagggctgtcattgctacctacagtagaagtatgtaacctcacaacccgcaaaaccaatcgggagaaacggagaaccgcatcaaaaggattaatatattgggaagaactccacaaacaataccggagaaacggaaacaaggccaaaacactatatttaaggggaaagccatgggcacatatgtagagggcttttctggaatttttggtattttcttagaagatcgcggaagtgtttcgcattctttaccaccatgaagaatcgagacgatattggtcctatagccagtggtgggacagttgctgtgacgcccttgcaagctcaagatgcaccgacttatctttttacgttgtatgattttatttttacatcaattgaaaggagagaagcctaatgacctacctagcggagattcttacacccagaccgatttcactgtcgatggcacacagccatctatctcaaacccgatggggaacccgatactaggtgagtgctattcacctgaacaagtaggattgaaataatcttagtgccaaatagggactggcacaacgagcggtggtatcaattgggtcggatacttgaccactctatacaatgtctcgccggtactcagctacaacttcgccgtcataggagcgacaatcgacaactctattgtcgatagcaaggttaaggatgtgacatcacaggtccgggacttcgagttagcatatagcaagaagcctacatctgcaccatggtcttcagataatgcggtgtttgggttttggattgggatcaatgagtatcgcgccttaataccccgttgtcagttatgttctaatgcttccaatttgtagcatcggccgcggtcatcaaaacacccaacctaatgtacttgtgccgacattaatggcccagtacaaatgtcttattgaaaaaatatatgcatcgggcggacggaggtttcttttcctcaatgtcccgccgacagatcggagtcctatgatcaccaaacagggaccggaagccgtcaaaacacacgctacgtgggtgagggcttacaatagcggccttcaatcaatgatcagtgactttaagtccaatcataccgatgtacgttttgatctcttgcagtatgttcatataattaacctgatcgtagactactatcgttctttacgatacctggtcctttatgccgaagattctggacgatcctcagacatatggatttccgaatgccacttgtttcaataaggatggcacatcctgcatttggtgggatcattatcacccggggcagaactaccataaactgcaggcagcagatatggttcagtacttgcagcctctcggtgcttggtagactggcagaggcggagcgagatagatagacgtgaatcacaagaggggatcaaaaagcagaccatagaatagttagcagtatggaaaatcccaaacacaagtcgtatagaggttagatatatatgtggtagacggacttaagcggaagaagcgtgtaagtgatgcagctgattggcccgggcaaaaatatcccaccacttcggccgaacttgacggacgaatatctatgagagctaactactcaacgagtgtggacttcttttttgttcttttgtttaagattacgtaggcctggcttgacctcgagtgctgccttgactcttcagggctgttgcgcccctttctcggccgttttgtctctactcccgagattattcctcgcccaaaggatgatgctgtacaacctccaacggtcattaatctgatcaacctctttagcaatatatcgtcggttgacagatgatcttatccttgccttttcactgtatggggtaagatgaaatcctgcacagaccaagaaccgcgaaagcggatgagaaaggggaccagaagttgcacagagtgtatgtgtcaaatgattgataattgatatctcggcgctaatagcgttcaattataggtcgtcgacgcaagatccgatgcacattccaccccaaccgcccagaaatctgtaatgagtgtcggtccagaggcatgaaatgtgttgatcaagaacatgcggttatcacccctccattatccggctaccagcggaactcccaacttggcgaacagccatacagcctacgcgagcgagtcgcgcacctagagaacctcgtggagcggttgaccgaccgacttgaccaacgggactctgacactccgtcttgtgagcaccatgggataaatcaatgttggtatctcctggatacgtgtgtattgatatcgcgtgattgacattaactagcggacggcataaatcacccaaggccactggctgccgagccagacgaactaggcccatccagtgaccagatttgcaatgcaccaatactacaactgttcgacaactatatcgtgagccgccaagaggactcgtcgaataatgataaattcaccggtgttcatgatatgtcgccaaaggccgaagcggtgcgtgccgaactcatgtctctccttcctcccgcagaagatatgaataagataatcaacgcgtcgttccactggtacgtgtggcaagatcatctcccagagctgttcgatcgacatgtcggcagactcgcttttaatgaaaattgtcgcgataatctagtggctcccgccgaagtcgccaaggcactcatgtgcctgtgtatcagtgcgagtcatgctccgtctgaattcgacttcggtactttaaccgtgccttttgagcctcaaaaattctctgatcgatgcattgagatggtggaccgtttaatcgtccgtgatgacaacttcgcggctaccctgcccggtatagaatgtcagatgttgctccacagagttcatttgactgatggccggctccggaaagcttggctagtgattcgtcgggcaatcgagtttgcccatttagctggaatgcatctgtccaccaagattccaaggccaggcgactccttttatgaacggcgcttgaaaatctggtgttccctggcaacatcggatcgatttctgagtttaattcttggcctgccttatggcatcagcgatcaattctttttaccacagatggaacaacgcctcaattcaaacttatcagctcccgaggaatacgtgttgcgcattggcattattgcgggacatatggttgaccgaaaccaagacccttccaagatgactatcgcagcaacattacgactggatcaagagctgcaggattcttgggaatctatgccaagtcactttcaagtcgcagagccttgtgaggatgagaatcgggaacactacattgagagggtcccgttgcaattcatgctcaagctactgcgtgcttttctccatctacccctgatgctgcaatctccccatgagcctcaattccgtccttgccacacgatcgcgattcaatccgcaagagaaggcctcgttttatacaaggtccttcgatctaccaccaagccctatttgtgcaaaatgatcgactttatggctttcacgctatgtcttcttttgataatccacctgcaaggctattccgatgagaatccatatcaaagtaaagagcaagatgaagaagactggggtatggtaaagaaggtgattgagatacttcgtcaggcggcaacagagctaggaggctcagttgctgctgagtctgcgaacatcctcggcgctatccacgacaccaaagatttcaagcacgattggagctgtctctcgagctgcaaaattacagtgccctattttggtactattactgtcggtgcaggaaccaagttttccaagggtcgcccccaaagcaaggagcagacatcagtaggatcaggcacaatagggacggaggcttcttgctcggaacaatgtcccactcagctctatacgccgccgatgtctgaccctgaaggtgcgctatgtaccaacaatgatgccttgaacggtgcttccctcacacccacgatggcgtctggatatccagacgaatcatggcagtcgagaagtgaagtagtggcaaacccatatgtcggcctggaactcaatgcgtttaatggactgttcgacgattttgggcagtacatgtggccaaaccgtaatattgacctcggacttgatcagggctggaatctgaactggtcagatggcgagccaccaccatgaatttagacacccttgtggctttacttaaatgtctgaaatatttatatgctgtaaattagaacatttgacaatatatgtattccgtcgaaagaaatgcgatttctatcatctgattgcatgaccgggaactggatctgttgccagaccctggtcatgtccaaattggccaagtagcattgattccctgcagtgtcaataccattaagattagatctcaatatcctgttaataaaatgtaatagaagagatcagaacaagaaatcgagcctagagaggtctagaaatgacgttgcccgggggttaaagggggttatgtaagattgttttccccagcatcgacctcgggctgattatctcaatgaacccgtgaaaggaccgtgtgatccctaaattattcccatttgcccgtttgattagtctgttgatgtttcccagttgcatggtcctctagatcctagtatatccttgttatttcaacttgctcttgccacaacacctcctccttgcctaacatacacagagcagaagataaacatggccgaacaacgcccctcggggttggaaaggagtccaactgcgccgccggttctctcaaacggccactttgcttcgatcggcgccgaaggtgatacggcctcctatgagcatggcgtgcaggtgattgatgggaataaggagttcaagtacgaccacctacatctatggtttaactaatcatgagccctgaatgctgatcgcatcactatagtcccaacctgtccaaatatttggcccttgagaaggtcacgccagctggtttcaactaccatctcatctccgtgttcggttcgcaatccaccggaaagtccacactgctcaatcaactgttcggtaccgagttctccgtgatgtccgagctggaaagaaggcaaacgaccaagggtatctggctttcgaataacaagaaccagggcgaagctggcgcgacggagcgaatggctgataacatcttggtcatggacgtggaaggaactgacggtcgcgagagaggcgaggatcaggactttgagcgcaagagtgcgctcttcgcgcttgcgacgagtgaggtccttattgtcaacatctgggaacaccaggtggggttgtatcagggagccaacatggggttgttgaagaccgtgtttgaagtcaacctgcaactgttcctaaaggacagacagtatgtatacttctgatggtccctttctctatcgctttaggtgctaacctctctccagcaccacccaccggtccctcctatttttcgtcattcgtgatttcatcggtaccacaccactcaagaacttgcagaagacattattggaagacctctcccgcctctgggacactatatcgaaacctgcgggtttggagaagtcgacaattcacgactactttgatttccaattctatggactgccgcacaagggttatcagcctgaccagtttgtggcggaggcaaaaaagcttggcctgcgtttccgggaaggtcaccgagacccaacgagggatgctcttaagggcgagttctccgaaggaggagtcttcctcccagagtatcatcgccgcatcccggcagacggattcgcacactacgcggaaggaatctgggatcaaatcgtcaacaataaggacttggatttacccacacagcaggagttgcttgcgcaattccgttgtgacgaaattctgcgcgaggtaatgatcggcttcgatgaggcgatcgtcgcatttgaggataagcaggccgagtccgtccgtgctggtgcgccagaggttctgggaggacttggcgttgccatgcgtgctgcgcgtgtcaagacgctaaagagctttgagacggaagccagccgataccacaagggtgtttaccaacggaaaagcgctgagcttcagggcaaggtcgatacccgcctcaaggcacttttccacggccagctgtcggcagctcacaagtctggaatccgtgacttcagtgattctgtcagtgctactgtgaaggatggccaaaagaagggcggcagttacgacttcgcggaaatcgtcaccaaagaggcccagtcttcgttggagaagttcgaggaggttgccaattccacgttggtggatggagcctcttggagcaactacgagcaagagctatctttgtataagaaagaactggctgaggtcagtgccggactgcgccgcgatgaaatgagacgtttggccacccgtgtcgagcgatgggttcaatcccgcctgggtgaatctgtgggccttgagttcaatgccctcgggtctggaagagctggcagtggtgcccccgagaacggggagaagcctgccgagaaggacttttgggatcggatctggaacttgttcgaagagactgttcttgacgctgagcggagattcacggaccgtgcgagcagcttcgatgctagcattgatgaggtcgatgttggtctttggcgactgcgccgtaagtcttggggtgttctccgcgccaagatcgaagaggagatgattgagggcaacttgctcctcaagcttcgggagaacttcgaggacaagttccgctacgacgaagccggagtgccacggatctggcgcccaacagatgacatcgagggcatttacacccgtgctcgcgagtctaccttgacagtgattcctcttctgtctcgtttccggctggaaagaactactgccccacccccgcttgaccgatggattgggcacactccaagcaccgtgacatctgcggatgaggaggatcttgcccccatcgggggggtagatgaacatgagggcaagagtttggaagaagagatgacaattcttagcgatacgaaacgccaagagctcactgtacgattcaagaaggccgcggacggtgtctatgtcgaagccaagcggagtgccattggcggtatgacacaggtccccttgtatttctacggtttgttgctggctctaggctggaacgaaatctgggctggtaagttttcattgatgaatccttcattttcgcagtctgtatactgacgttggtcttcagtcctgcgcaacccggtttattttattctgctatttgcgtgtgctatttgcgtatacatcacctatcagctcaacctgtggggtcccatgctgaagatgaccgaagccgcctcccagcaagctctggaagaaggcaagcgccgcctgcgcgagttcctcgagtcctctgacgctggccgccaggctattgctatgtcggctggggagcgtgctgcgtcttcaggccgcaaggaagagtatgaaatgtcggatatgcaaaagagtggctcgaaggctagtgatgacctggatggcatgtaactaccttgctcttctggcgatcacactgtactttactttctgtagcttctataagcatacaatgtggactttttgactacaatctctttgcacagaacagaagattcgacttttacgactttgactcgattgaacaacttactacatatttcttgcatcgtcgttgtgaatgcatccacgcattacaggggatggtgggggacagaagaagagaagggggggtttatactcgcaggtcaggtgaggacgttgcaccttccagaaggatatcgattacgttattaggcaggtgtacacaggttcagaaggaacgacaagggttctgcattccattgggatacagaagggtgcggcagcgcgtgaaggcatattctgggccttcttgatttgcttctatttcatcggaactcaacttctacatcagctcttcggtgatatcatatcctgctatgttagtagcatctcaatggcgaccttgatataccaaattcaactactgcgggggtcatacccacgtcaagggtccggacttcctccgaggtggggtaggtatatattcacccaacccagcgactaccaaacttagcttgtgcaatgtgaagctttgaagttatttggctaatctccttcgccaattccctttatcctgaaccatgtccggtattcctaatctccctgagacattcgatgatctccccgacaagcgtcggttctggcctgggaccgcagggtcagaagaagaagggctgggaatgctccgccttctgacgcccgagttagtcgctcgcgccgcacaaacacaaatccaaacaggcgagcgggtatgcttaaactggaacatggagaatttgaacccaccaggtagaacaagggcacctaaccgttgaataaaatgagaacctgtaaaactcacaactcgagaaaccaggattcggtcgcaaaccattcgagcaccgtgtcaaatgggtcgctgagggtgtcgctttcgatgacgagtaccacttcaacccacagcagtcctcccagtgggacggcctccggcaccacaatgcgccggccccaacaccagaagacgaagaccgacgccttttctacggcggtacgacggccgaggaaattctaaacgagaactcgtcgcggattggcattgggttttgggcgaagaagggtattgccgggcgcggcgtgctgatcgattacgtctcctacgcggagaggaatggcctcagcgtaaacgcgctgagtcggcaagtaatttcattggacgaggtgcagaagatcgcgcgcgaatgcaacatcatattccaaaagggcgatatctttttcttgcgggtcggcttgcccgggacgtgggagcggatgtcggccgaagagcgggtaacatatagtcagcagggcatgccgcagcatgccggaatcgaacagagtgagcgagtgctgcgctttatatgggataatcattttgcggctgttgcatccgatgctgttagctttgaggttttcccgcctctgaacccggagttcgatttgcatcatcatcttctggctgggtggggtgtgcctattggggagatgtttgatttggatgaattggctgcgacatgcaagcgtttgaagcgttggagtttctttatttcgagtagtccgttgaactgctcccggggagtgtctagtccccctaactgcatggctattttctaggttcttttaagaagctttaatccaaggcaatttgtagattcataacccgatttatcatttggggagtacggagtatcttaatgtcatatccattaccgccacgtgacccagccaacagacacctaatatataaggccaacatttttatatgacccacttttcccttttccccctttgcctcggaagcacacggcttcattccaatattgtttattgtacagatgaatcctcgactcgaattgagggtaatattgaaggtcgaaatcatgtcttgaacatgcaaatcttagcatgtaggcctttttgaaatatgactgatctcgacgctcagccacatcctagaacaggctaacgctaaggtctaaacatcgctagatttatcctcatgattttttttttcctttataggcgaggcatgctgccgccatgtgaaaatttattttcctctctgaagatatgccgcccaccatcaaacgggtggcggctcttctgtcctgcatcctcctagttctagggctctatatttactatcaacctgaaccatcacgaccactcacccacaatggagtacttgacaaatttcctgccaaaaagccaaatcgacagcaattgtttgatggctcttgggattatcagcgcgatagagataatctgatgctcacacaagaccaatgtgaccaggcatttcccgatctatacactgaacttgatcgcgccagggacgatcgcaaatctcgtccgatatccctcaaggaactggatgcaatcccagcccgaaatggatatattcgagctatgatatatgatcagcaggtaaacaacatcatttcgtgggtcatctacttagtgctaagcgtggtctagttgtatgtgatcgacaaggaaggctccatttggtcccgagaaaaagctacactgtctgcgataaatcgagcgatcatttcatcgccagagccgctccccaatattgaattcgctttcaatacagatgactcggtcgatgaattgcccctctggggatacgctcgtcgcgcaaaggacaagtctatatggctgatcccggatttcggatactggtcctggccagagaccaaagctgggtctacacgcgaagtacaagccaaagccgaatgggcggaagaagaagggttgacctggagtaataaaaccgccaagctgctctggcgtggagtgccgatcatgggcccgacaattcgggataagcttcttcaagtgacgaaagacaagtcctgggcggatgtgaagccgcttgtgtggaatgataaggacagtttgaagaatgactacaagactatgccggagcactgcgagtatcaatatgtcgcgcagacagaagggaatacgtactctggtcgtctgaagtatctccaaagttgcaggagtgtggttgtctcgcacgagctggagtggatccagcactactatcatcttatgaaatcgtcaggacccgagcaaaactttgtccaggtgaggcgtgattggtcagatttggagcgacaaatgcagtatcttttgtctcacgacgatgaggccagacgaattgcggataacagcgttcaaattttccgcgagagatatctcagtcctgcggcagaggtgtgctactggcgtcggttgatgcgagagtggaagaaggtcattgatttcgagcctgaattcttcaagatggtggatgggaagaaagaatggagaggcatttccgtggagagcttcttgttgatgggagagctggagtatgatccccgatgaaggcactgaaatatatacatgtgataccccgattcgaagcttaaatttggatcctttcccttattgactaagatacttcgcagttgggatatgctgaacgcgcgagctgggtattattcaactggtttgctggatagcccggtatcagccaagcccacacttatatagaagtaggcgagaattactatactaaaggctacaattaaactatagagattacttggccccctgtaaaactagtgcttcattcttgtgcgagatcaacatttattcgccaagactgttttacgcattccgacccttttccccttcccccccagtgccttcgtgactctgctgcaaaatactaggtaggtagtactcaattaaagtcctacattccaagttcttggaaaatgtgttgttttgagactatgtttacccaaccacaatgatcgtcgcgtgccatcgcttcttgggagcaactacttaaatactatgagacgcaattcctcgtcaggttcctcgaaccaactactttcacaacatcgacactctctttaacgcctttcctagccggagaattactttctttacccaacaatctttactcccgaccaagatgcacttctctaaggtgattccacccctcaatcgttatacttagatgtacacaacttgctaacacaaacagacccttgccaccgcggccacctttgccatgactgtatacgccggcttccctgtcgccagcgttagtttcctctcatgggagaagtgcgacattggccgccccgcactcggcgaggccaagttctccgccgatgtgagcgtcactcctgtgacatgcgacaagacccctgtcaaccgtgactggagcattgacaactattccttccgcgctcgcttggataccaaggacaccgttttctgccacggcgtgaccatctggaacaacgatggctgctctggtgagcctgtgtacttcctgcctttcgaacacagccccttcgccgagggccagtgtctccctgacatcctccagcctggctatgtctctttcaagctggcttgcgagggtttcccctagaggcttaatattcgatttccatgcaatcatgacttccgagattgtcatattggattctatgaagaccttggatcggcgatagatacctacattcattcattgtctgttttctcttatgtgtttcttacttggccctggctcacggataaatctggtattaccgagtacttcctaggctatattttccacgagaccacacttcatagcataatgtttcctaccgaccggcaaattcaacaactaatttctcttccatgaagaacatacaatgcatagataggcaagaagcatcaaatgttggctagtcctgagttttgacgctcatggttctgtacatataacatgaggatatcaaccttattacatggttaggctactgttagcgtggcgactactagtcccgaaattagctcaaccaagccaaggatgatgtttattcaagctggtcaatgacgacgagttcaagtaatctcgcttgacttaccgtgtcgttttgctttgttaagcactcaactatagatcactgaacgcttggcaactgccaaatctgcgtcaagcgaatctagaaagccaacaaaccagactcaataatcatgaagctaaaaagtctggaattctagcacctttcggtagcttattccaggaagatactccaaatttggaacggctaactacgcatagagcttgctagcttcattgccggaccctctgactgaattaatacggcagtaactgtatgacacggttattagcaaattacataacctgtctgtaggatagttcacctgcattccaaatagcgctaataccaaaattgatgggcagtagacttctcggcatggaaacaaggttggagacacttgtctgttctagtcctcctctgaatttgagtctttggcagatacagacaggcaagaagtagagaagaggggtgggctgggaatcagaaattctgtctaatccggcgagggaggcaaggaccgaccacatggacaggtgacacttgcagctgcgctcgttaaagggtctcattgttccttctcctgtcccatattccaactcatatccctattcatacacaaccgtacgactatcatgcctacagacccgaaaattgacaccctgcaccatcaactcttcgaagaggggctgaaggtgtgctgggaggatccttggcgacgagtacatggaccgggctacccacaacgccaacaccttcccccggaaaggggctcattagcgagtggctcccatcttccattcctatctgtacccttactttattaaatattatcttttttatcttcgtcttatatgccttttgccttttcctatctatgggtacttacacgtctgcgggtagttcagccagccatatatgaactcctttccaacccattgctctcgatgccaggttgggctcgtactcggtttcaaccgggtatgagccgcggatcctataattctgctgcccggtaccttagcttagttggtactactactccgtactctatatctatcatatttgaaggatttggagcaagctggagtgctaatacctagcggcgttctgtagatatagtgaagtgaagaaataccctacccataactgctccgtaccggttcgtacatctcgcaaattcaagcaaggagatctggacgcccaagggtggccgggaattcttgtcactgtctgcatgcaaggtgatcatttggcagcctcatatatcattcttcttgtgagattatgcaggggcataggggctagggttactttcggatttaatgcaattcattgaggccttgttgcctgatgttggccttaatactgaccgcttcttggagcgaagcgaagcaatcacaaggtcttcttaaaagttttcgccatggaataactacctccaactcgacaacttttttaccaccttactctatcaagataagctcaatagatttgatttttattagagtgttttgaatttttcaggtcccggtatggcagtcaaaattgaatgtaccttccagagaaaacaaatttgaggtaaatatctgtcgctgaggtgatactattgccgagtctacggggtacgttgtcactattcagctgtcaccactgaagccctattcggcgtgccgtctgccgggtgccgcctgttgtgtaccctctgccgcttgccgtctacctgttacttcccgaagctaaagtcgtaaaaacctcttatattagatgaattaccaattctctattcaatataataaaagtcaagtctattgatatcgagttttgtagggttatcactgaattcaggctcaaaccgcctaagaatcatgcgatgtatggattgtatggcaaaaatagctttatattcatggcgccagatgcgcaggcctccgtaataggtatcttgatttttctgccataccaaactaaggtattaaggcgccattgtatgcattaaatccgaaagtatccctggccctatgcccctgcgtaaaaaattggacgggatctcgaggcgtttcaccatcagagcagtctatttgctgctcatgttgcggattatcggtctggaacgctgcacgtggaaggcaccgtccctcagtgttgcgtctcaatggcgagaccgacgatgccagctgaaggaaaaccttcagttcatagccggatatactgagaggatataaaaagggctgtttattcccgctgcattatatccaacaacattccaacgggccattctgaaaataatcgagtatatgaagagtacaaaaaccccgataccttagttctgctgtctcgccttcgaaagttctacatcatatttcctttaaaacaaatcacaatgccttccgccgttcggccttctgagatgcacacccatgttgccattgtcggtgccggacctcgaggaactagcgttctggagcgtctttgtgcctcggcacccgagtatcttgtcccaggggcacgattgaccgttcatatcgttgatccatcgcccccaggcgcgggtcatgtctggcgtacaaagcagtcggatcaacttctgatgaacacagtcagctcccaggtgaccttgttcactgatgatagtattagctgctcaggcccaattcgtccagggccaagtctctacacctgggctgccgataagatccctggccttggacctgatgattatggaacccgtgcccagtacggccaatatctcgaatggatcttccaagagactgtgcgacaagcaccacctcaagtgcagattgaggtgcatcctgcttttgctgtccgcttgtatgacacgtcctatggccagcaaacgctcaagctgtcgaatggccgaaccctttctagcctcgcagctgtcattcttgcgcagggtcacgtcccgcttctgctagatattgaacaactgaaaatcaatgcttacgcagagctaaatggccttcatcatatcacgccctcaaacccggcggatgttgatctttctgttattgctcccggagagaacgttttcctgcgtggtcttggtctcaacttcttcgattacatggccttgttaacattgtcccggggtggtagcttctccgaaactcctaacggcttgaaataccacccatcgggcaatgagcctcggatgattgccggatctcgtcgtggcattccataccactcccgtggcgacaacggcaaaggggcatacggccgccacatgcccctcgtcttcaccgaagaagtaatcaacgctttccgcaagcattctgatgctggaaaagccccagacttcctccaggatatttggcctctcgtttccaaagaagtggaaaccgtttattacttgactttgttgaaacgcgataagttggaccagaccgacttccagaagaggttcctagaaactgagccaaagagcccggaggaagcgcaagtccttcgtgactttggtatctcggaagagaagtggtggtcctgggagcgtatccagcgcccacagggagatcaggtcttcaatactaccactgagtggcgtgagtggttgatcgcctaccttcgtgaggatgccaaggaggccgcccttggaaatctgaacggtccactaaaggcagctttggatgtgatgcgcgatctgagaaacgaactccgactcatcgtggatcacaatggtttgaccggcgcttctcatcgagagaatctcgaccgctggtacacacctctgaatgcctatgtgtcaattggacctcctcgccaacgtattgagcaaatgattgcgctcatggatgcgggggttttggaagtccttggtccccgtccacaggtaaaggctcaggacgaggcttggctagtccacccccccgcggggnnnnnnnnnnnnnnnnnnnnnnnnnnnnnnnnnnnnnnnnnnnnnnnnnnnnnnnnnnnnnnnnnnnnnnnnnnnnnnggctgggctagtccactcgcctgaggtaccaggcgagccaatccgtgttaccacattgatcgaagcccgcttgccagagccgaaactccgaaacacgggagatgagcttctttcccatttgttcaaaactggtcaatgccgcgctcacacaattgacggatacgagactggtggtcttgatgtgactcaaagcccataccatctcattgacacccatggccgtgcgcacccaaagcgatttgctgtcggtgttccaactgaaggagtccactgggtgaccgctgctggtgccagaccaggtgtgaactcagtcacactttgtgacactgatgccgttgcccgcgctgctcttagcgcagcagctatcaaggctaagatcactcagaccaagattgatgtgaagacatttccctgtattgaggtgtccaagctccgtgtccatgcttgaagcgagtgtggttatcatgtgcggagaaaaaaagagagggatatattggtgaaagtgacgaggaaagcgaggaatataccggaatggaaagggagaatgtgacatgccataaattttcaaattgatatttttatgtatttgtagttcaaatcaatgtttggtttccagagatagcctgatcttattgcggagcggctattaaatgaatgatcttaatatacaggggtatcccgtagaatgaatgaaacatatgcacaactgaacatataagacaatagtaagacaacagctatcgatatcgaagagatcatgtacgctcaatcgtgaattgcaaagacacctcccatctttgacccccggtgccatacccaccacctagcctgttgcgaatcaagctagatatcttctcccgtagccggacaagattatcctcagatccgttgactcggagcttgaggtttgccatgcacagcccataatggacctgccagaatcgagcgtcgtcaatgccgaacacagcagcgtcggcttcaatatccttgataacatcagaaactccttggccggagtaggacatgagaagcatggagcctagagttttcaccaagcgagttcccaggaagcacattgagaatgcaatggtaccagataagagcttatcgagccaatcatagatccggatcgagaccagaggtagaagcagcagcagagctgaacaagagagggtgagaaagtgggacgggttgctcaagaccgatggaagagattcgatgtacccaaatcgcatagccttaccgattcgagcgtggttcttgagaccaatggctgacacgagcgttgatgagatagctagaattgcagtcacatccacactacccagagaaatccgatcatggtcatgggggtgatgaggctcatgaccagccttctcgaggaaatgctgcaaattatgggagattagatccatccccataaataaaagaagcacagccatagcgaatccggctaaaacttctgcacgttcaaggccaaacgggtggcggatagttgatctcttccaaacttcaaaattgccaagcacatctaccgcaacacataatagagccccgagtgagtcaaatagaatcagatgtgacagtgctgtcatggccaaggatccatgtgcggtccagagcgtgtatgccgcaatgaacatatggcacacactccaccagaagcgggtcttttgttccttcgacatgctagatcggcattctttcagtgttggcatgggcaaggagttcggaagggctaggggcgcgcgaggaggaggctcgaggaagatctggtgcgagatgctactgtgcttgtacttgtggccacgacgttgtcccatgttctgaaacacgagggaataagttaacaatgccgtcgtcacaggtcatcagcgcaattcaactcaccgatttgatcactgggctcttcgccattacagtagtattgaaattgaatggcccggcggatgtgtcgcccaagccattctcgatcggcgtctctgcatcttcaggcgaggttgctagattgaaagaagactttgtggggctcagagtatttctgatttcggcgtccatgataccctttgtaaaggaagccttaagcggtgatagggaattgcgatcgatgggtatccccgagttgatctgggaggcatgttcgtcgtccgctggtggagtgggggtgcgcggggggagagggagaggaagattcgaagccatcgtgctggctttacgaatataatgcctttatgaattgatgtttcctatatacacatgagtacatatataagttcagttcggggctatcactccccccggacgagctccaatgtttctgccgaccatcacgtgggcggcctaaaagcaccctgaagtctgaattatgagataggttcaagggtcgtttggacaaaaacaggtaataaactagtctcaatgtttattctagctgggctcaagtcttattcgatataagcctatgacctgcagaaacatgcacaagtacggaagactttattttcattggttgtgataccataagcgggcgtggggccttgttccataccgagaggccatttttcggacttcatctcaataacagctatatatacagatatacagaggtataagtagttgctgtctagcatgtgggcttatgggggtttaggcgaatgagtttatcgggggagggcccgggtatgcatggcaagcactatggactaacagacttcgatgtaattgttcgaagaaactagtcatttgaatcggccaggatgaaataggtacaacgagagtaaaatttgatttgtttgaaagaaaagtcgggttcggacctggtatatgaatacagagtcatgaaatcagtttgcttcgcaacgctcgtttacactatttcaatatatcgcttcaactccctataaccgagttagtcttgcgtttataggttgcacagtattttcaacttaccaatcagtcacagcttctctccaaagtcccaattcgtgctgtcttgtggctgtgaaaaagtctacaaactccgagctcaaaatctcccgcgcaatacttcccggagctgagaaacggtccaaagccttgtccaaagtattgggaagaagttctggacggtcctctggcgtgcgtgcagacatcggtgggaccttgatctcaagctttttctgtacacccctccagccggctgcaaggatgacactcagtgcataatggggatgtagatcagccccaggaatgcggacttcgaaacgcgtggcacctggcttgcatactggtggcgtgataagacggattgaggcaatccggtcctcgagtccccagctaatgtgcactggtgcccagtagttctccacgaggcgcttgtatgagttcacagtcggcgcaaacaatggcatgatatctggcagagcttccagaagaccagcaaggaaatgacgtcctgtttcggagaggtatgcgatgtccgaccattgagggttcgcctcgggtgtctctcttgcaaacagattgttcccatccttgtcagaaagggagatgtggatgtgtccggagctgcctggcatgccttgcataggcttagccatgaagcatggtgtaatgccgtggtcaacccctaaggacttggttaagagtctgtcgacttgttagagctagaagcaacatttgcggtatttgcggcactcacttgaataatgccactttgtctgccatttcactaatttcggaaaccttcaaggcctatgtagagtgtcagagtagttcacgggatgacctgaacggatgacatactgcttcatagacaccgggccctccctcagtgtgccatccttcaatgccacaatttatctgcgcactggtattgaaaatatcgtagaagtacttcttgttgacaaccggtcgcgttgaactatagcaaaacatgccagctgtaattggccgcaaggcactagggggttttttctctaagaaggtagcgaggttggggtgctgggagcctgcactgccgtatccatcttcggaaggagtctggaagttcataaattcgagttcgactgtctgatatcagctttttagactccctcgccaaaatttcccgtgacttacctccagctaaagcatgaagcccttcccccgcaagcctgtcacacagactcctcaacatacttctcccatccgcagaaaccgggcgtgtatcatcaagaaaacgcactaggaagaaagggatattttcttcccaaggtagacggcggaacgagttcagatctggaacagccaggaagtctgcgtaccctgattccgggggcgcgatccgagtatcagttgtccatagcatatcgtgcatgtcccagccgaaaagagctgagctgaagccgaatcccttttcagcaatcccaaggaacttctccttggccataactttgccacgaagcactccatcgctgtcgataccggcgactttgactttgatgtcatcggccagaaggctggggagtgattcgagagtgattatagtgggcgtagtcattttggagaaatccaacaatagcagcaggactaactagccgagttcaacaattggggtgtgaattaaaagagacatttcgccggcccctgtggctttatacaattgcgtgaattgtgggttgttgaagttgcgggtccaacatgtggtcgacattaatgccgcgcatcactgagaccgaaaatatccccgcgcggtgcagatggtagacaatagcgcgtactctctttacacgcaactttggaaaacaatggtcataggtgaagctatgatgggatgtgagatgctccgcggtccgcgctgtggggttccgtagatagcgcgcttatcctgtcgaaatgatacagagcttgagagtccggctttggattaaattgtattaacctcatgtgttcattgttcattctgaatctaaagtggaagtacacattctccagtatgataccctccattcgcattcatatcgccgttctcgtgtgtgacacgcctatccagcctattctcagaaagtatggcgactacttttcaatattccaagaccttttgaggaaagccttgaaagacttggaaatatccgagaagttcaaagatattatggtggaatttagtgaacatcagatggtggacaacaaccgatttcttgatctagaggacgtcgacgccattcttctgactggaagtagtatgttaccattcactttgatatccgaatggggcaactaacactacttggtagaacacgacgcctgggctgatgaccagtggatccgtgacctcaccggcaacgttcgtgagactgttttaaaacacgaaaagccggtgattgggatttgctttgggcatcagattcttgctcgggcgctaggggctcgagttggcagaaacgaagctggatgggagatttctgtcgagaagctcaccctgactgagaccgggaagaaactatttggaaaggatacactggcaagtggagaaacatctggacaagctcggttgagggaaattctgattggatacagagcattcaacaaatgcaccgggatattgtctttgatgttccaatcggttgcgcaaacctggctacaagtccaaaatgtgaagtccagggtctttacttgcccaatcgagtgctgtcggtacaaggacacccggaatacaacgaggctataatgtcgtgcctgctcgaagccagacatgagaatgggatgtttgacgatgaattatataacgatggtttatcccgaatgggtgattcccatgatgggtggttaatagcgaaggtaattgcaagattcatagtagattcgaaggccaaataacaaaacaaaatgatattgttagaagatcgagataaacactaaaagtgcaagaaaaaataagtgagataagctgtcagatatgcaaccgcgccggctccgcgctataaattccacctctcccaccttcgggattccactctttttctcaccagatacacaacctacgctatgtcaaaccagatccgtacagtctgcccctcaacgcacgaggtcatttttgaccagcctggcacttcactcaaagaagctaccaaagttgctgctgcctcaaagcaagcctttgagtcatacagaacaacctctctggaggatagaaagagcattgtgaaaagagcattggatatcattgaggagcgtcgcgatgacctcgccaaagaattgactgcgcaaatgggacgacccatccggtactgtgcatcggagatcaacactatgcgtctgcgcgccgagtacttgatggatattgccgaagagagcctatctgatctccctggtcggccagaagccggcttccgccgaacagtcaagcgtgttcccgtgggaccggtacttattgcgggtgcttggaatgtgagtgagcactgctattgaagtatcctcagattagctcatcaatatgatagtatccttatctgactactgtcaatgcccttgtcccggcacttattgctggtaacagcgttatcctgcgcccttcaccacagaccccgctatttggaaatagactactcgaggtctttactgaggcaggacttccgcctcaggtccttcagatcattcacgttggagatctggatgtcttggatcaggtggcacagattttcgagatccagtctgtctcattcaccggttcaactgcaggtgggattagactcagggaggcaaccgcccatcacatcaagcctgttaacctcgagcttggtggaaatgatcccgcatatgttcgtccagatgtcgacgtgaagcatgttgcagagcaactcgtcgacggagctgttttcaattcaggacagagctgctgttccatagagcgggtatacgtgcatgaaaaaatttacgaggaatttgttcgcgctgtgcaggaggagctgaaatcgtgagcttgactacgttcgaaagggaatatctctctgacattcgaatcaggtataaactcggtgatccacaggatgaaagcacaactacaggccctgtcatctcaacgcaggccatggagaagatcacttcccatgtcaaagacgcgattgctaaaggagccgtcaactctactccccagaacctaagctttgaggtagcaaccaaccctcaaacccaaaaaggtaactttgtctctccggttgttttgaccaatgtcaaccataccatggctacgatgaaggaggagacgttcggtcctgtgatgccaatcatgaaggtctccagtgatgacgaagctattacattgatgaatgacagtgagtatggtctgacggcgagtgtctggacgaaggatatcactcgcggagaggagttgatcgatcgcattgaggccggtacggtgttcattaatcgctgtgactatccaagcccggtaagatattttgacaatttatcgacttttcgatggctcactaatgctaatattgcacattaggaccttgcctggactggttggaagacgtcaggtttgggatgcactcttgggccacggggatacgatggatttgtgaagctgaagagctaccacatcaaggatggctcagcatgagtaggcgggtttgaagatgattaaataatgttgtgatctagaacaattcaagaaatctcaataccgttatttattggatattgtggcctttggccgtcacttgtatgcctcagccatagacggcatagaccctcctacgtaggacaactctcaccctcacacagtagccccgcaacagtttcattcaactattcaactgtccgatccgagcatgtctcctacaatttgaacacaagaattcaccatagccagctcatgaggtttgtaattggtaacccccgggcctgtgagcatccgtgggatgctttatccaaagagacccccactataggtagcgcggtcccggaccgcgctcccttaggcccaagacccaaccactaccggaaaatgcttcatgcacttgaacgcgtgaagatctatctaacagctacccctcatgccccgcatgttgagctcaccgcgccatcgggtggggtagtaggagcgcgatggagctttgaacttgtaccacatttgtgtgaattgagatgactcgaaaaagggaaaaggggggaatatagcgcgttgacccgcgcgggtggtctaattaccatgtggacttgatatcggttggagctgctccggtatggagattgtacaatgtggactggagattggagaattggagataggaaatgctataaatccaggccgttaccaagagccctctgcagtcatttttattcattcttgtcaaccacccaaaccgttccattctccctagctccttcaatcatatcacacacacaaaatcaaaatggttggacgtcttgaaggcaagaatgctatcatcaccggtgcagctgggtatgtacctctatcccactatccaaccgaacaataaaagacagaactaacaaaagcagaggtatcggtctcgaaaccacaatcctcatgctccgcgaaggcgcctccgtcctaatgaccgacattagtgaagcaggcctagacaaagcactttccaaggtgaacagtgtcgtgcccgcctcaacccgcaccggaaaggtcgagactaaagtcgtcgatgtgtcaaatgagtcccaaatcgaagcagcagtcgctcatctcgatgcctggggtggattagatatcatcttcaataatgctgggatcatgcaccccaaggacggagattcggaagagtgtcccgaggatatctgggatcgcacaatgaatatcaatgtgaagggcgtgtggtatggctcgaagcatgctgtacgcgcattccggaggcatggcaagaagcgcgctagcgtgattaatactgctagtatggttgcgctggttggggcagcgacaccgcagttggcgtataccgctagcaagggtgctgtattggcaatgacccgggagctagctattgttcatgcccgcgagggattccgattcaattccctttgtcctgcgcctctcaagtatgtgatatcttggcatttccccgttcaaaccctttgatggaactgacattcagatagcacacctttgttgcaggattggcttggtgacgataaggaaaagcgcttccgtcgtgaggtgcatttccctaccggtcggtttggcgaggcgattgaacaggcccacgctgtgatcttccttgctagtgatgagagcagtttcgtgaatgctactgacttcgtcgtcgatggtggtttgacaaaggcatatgttacgcctgagggtccggcgacggaagcgccgaagaacttggctgcatgaacggatggtgactttgctaggttgtacataatatgagtaacaggatgacgctcaacatcatgcaaatgagatccatatttggttttgctgcattgcccgagaaatattccatggcccggcctcggacgcaggtgattcccacattgcttcgagcagtagaagtgttcggttcatattaccaagaccaaatgtctcggtcatggcattcaatcgtcctcgtaggcaattctgttggtcggggttgagaaggcatgagcccaccacagcgatcggccaacagagcccggagttgatgcgcgcactgggcgacagctcatccaggtatgacatggcttctgtcacgacattttccaccatgcctttatacattccatctctggtgtattggaatccacctaaagaggtgtacagatagacgagtatggcttgttggaaaattagcccagccagacggacctccgtttcgacattgggataaggtgaccagcgtagaatctgggcttggatagatgcaaacatggcaatatcatcagctgttggaattagcgcctgcgtgtcgtccatgatccactgtcggccaagatcgaagatacacgggatcagcagcaatagctccagccagcaaccgcacaagttgcccacgtactgagtctgaagtaattcacgcgaccgttgttcgagatccaagtttaagaagatttgcccgctaaagcgagcatcgattgagatcatgctgacggtcgcagtataggtgtagtattcgatgacgaaatctttcaagtctcgtggaactgccgagtcactctgggcaagcaatttgactaacaacgagttggcggcggataagtggtcaaatattgtcccgttcatatcaccctttgctgtctgtttttgtcagattgttgaacccactacttttgaatcatggatttcctacctcggtaaaacacatcagaagtgccccaactaggagcacgagggggttcgattctttgccgttgataaagtctgttactccacggcggaaatgctggagggcttttgagtagtggctgtgggcaattgtatccgattcatctcgtgaccgaaacgcgcggtgagcggcgctttgagtgattaccagctgcaacagcaaatcactagaaaatgccaggggtacaatctgtaccaggaaggggttgacaggcgtggagccatttgccatgcagtcggctgttgtggccacgtaatgactgagaagctgataagactcagcatcatatccaggcatcatggataggctgcgcggcagcacgtttcctattgagaaagaggcgacaagagaatcactggaaatggcagtcctggtagacgttgacacttgtcgtcgattatggatctcctcatgcagcgttgtgtcttcaaattggtctccggtagtcaccgagtgccctgaactcgaagaaatcgatggcgttcggtgagttgagggactcctaggcatcgccatttcgtgaatttcttcggaaatattcgctcggcactcatctacagtaggtgcttgagtttcgtcctcatggctgggatctctcttgccaggtacatctgggggccactggcagcccaggtcattgcgctgacagccagcacagattggatgtgtctcgtcgcatttcttcttgcgacgcctgcaggtcaaacaacctgttcttactcggacaattcgctgcacacgtcgatctggcggcatctttgattagaggagatcaaaagaaggcaggagattaaaggatctcagcgccaatctaacggttatctctgggtagagataagaaagtgtggggtaagccgagccggccacttctattcccgagcacgtttagagaggtttgtacaaaaatgggtttgatgggcttgatggtttgaatggttttaatggtcttgatggtcttgatgttcttgacaatctttctaatatgaacctctttaactgtatatcgagcttcgttcggcagcaaatgatccatcgccacagtattgcatttatctagaaagccccagacctcagcttccttatgccacaaatcgttatatatgcagcactctagcacggactttcacagaacatttctggaaaactccgagtctgatcctaagttattccccggcaactcaagggtcagccacgaactataaaccagcggtctagactcgttaatataagaaaaatgtaacgtaaatcggactaccgaaaacgatcggaaatcggacatccgaagatacataaacaccggcatatattgtatagatcaatcataatgtctccagcaaatctgcgtgatcccgggatagcagcctgtttgtatcggacataaaaccaacacaagtgtcagccaatgaaaaatatcccggaaccgggagaaccctataccggcttcccaatgtggcatatggtattggcgatcagccatcgcacgtgacttatgtgccgaagacccgacaatcaacacctgaggctgcaaacggagccacgaaataccgcttctccccacatgcacactgccttaatgacaacccaagacgggtcaagccgccggtattcaggaaaatttgtgataaacaaaggggcaaatggggtctggccaggggtcatccgtgtcaagctttgggtaccagccaatcactatgcacaatattccaaactggagagctgtgggttttcttctggcggtgttaaggtccttcctgctttatcaccgttcgcaatggttggaatatgccggctttctgcctgatggttttttattgtggctattgatttgatataaaaacgttccccgctgttgcagtctggtcctttttctctagggaatcaatcagtgtcgcgtgcccatctagttggcttcatatattaaaatttttcagtcctttccccaattattctcgattggttctccgcatgagcatcgataatgtcggaccataaagaatctggctcgactagaccacagtcggcatcaatatccagtaccgattccgagtttcaggcatcaagaacgcagtcacgatctcagagcttggctggttctctacggacgaggctacggtctctgtcaaattcaggaatgacccaggtagatcgagtttattcgggtcgacatctcaatgaccagtcggtataccacagcgatgagttcgatgggtccgacgatgatgagccgtctgtcggaaacgagcatatgcccgatatcattcaggaagtacggaacgggattgtgaacgaacgcgatttggatctagaaagagccgatactgcacagcctgaactggagaaatcaaggacatcaaggtcgaaccggtctcgtcacgacccaaaactggtaggttgttccatgttcctaaatctgcattcgatattaagttgtacaggtacaatgggatggccctgaagaccccgagaacccaaaaaactggagcagcaagaagaaatgggctgctgtcatcaccgtatcactattcaccttcatctcgccggtctcttcgtcaatggttgcaccggcactgccatcactggtagcggacctcaaagtcacagacgaagtagtttcacaacttatgctctcaatcttcgttctagcctacgctgttggcccattattcctcgggccattttcagagatctacggccgaaccatcgttctgcaactcgccaacctcttcttcctagtcttcaacatcgggtgtgcggtctcacgaacgaaagtccaaatgatcgtctgccgattctttgctggactaggaggcagcgccccgctagcagtaagccaagccgcaaaactccgctcaagaaaagcttatatctaaccacatctagatcggcggcggggtcctttcagattgcttccgggctgaagagcgcgggaaggggattgcaatctacagtcttgcaccactcctaggcccagcccttggccctatcgcaggaggcttcatcgccgaaaacacaacctggcgctgggttttctattcaacctcaataaccgacggcctaatccagctaatgggcctcttcttcctacgcgagagctacggtccgaagatcctcctcgaccgcgccgtccgcctgcgcaacgaaacgggcgacgaatcctaccaaacagaagcagagcgccaaaataagaccttacccgaagtcctgcgcagctcgctcatccgtcccttccgcctcctcctcacccagccaatcgtccaagtcctcgccctattcatggcctacatctatggaatcatgtacctcgtcctctcaacatttcccaccctctggacaagcccaaactattacaacgaatcaactggcatcggcggcctgaactacatctctctcggactaggcttctggctcggctcacagatttgcgccccgttaaatgaccgtatctaccgccgtctcaaggcccgcaatggcggtgtcggaaaaccggagttccgcgtcccgctgctcttcgtcggcgccttctttatcccctctggcttgttcatctacggctggactgctcagtaccactgccattggatcgcaccgaacatcggtgctgtactgttcggtactggcaatattattgccttccagtgtatccagacttatatggttgatacctatacacggtttgcggctagtgcgcttgctgctagtgcattcctgcgctcgctagctgggtttgggtttccactctttgcaccgtatatgtatagtgctttgaactatgggtggggaaatagtttgttggcgttcgtggctattgtcatcggggtgccagcgccagtgtttttgtggaagtttggggagacgttgagaaaaaagagtacttatgcggctggctaggtccttctgagtttttttaacattattatgcttagaaggggtttttcaatcggctaactcaatatttaattcctttgctgcgaaagtaagaagctatggcgaacacggctgtttttttggcatgtggccgagattgtcttcatgaatgcctcgggccctataactgatactttatacccctggtttgtttgattcaagacacggaatttatgccgaagcacatgtaagttttccttggtttgactctcctagactttctctagtcggtgctcgatctgcaggggtttccaaggtcctcgttagttacgagttacgacacacaaattggaggttgaatctgaatggaatgccatcgttaattcgaccagctttgcacctaaaactcagtgtagaattatatatacgatattgtcaagccttatttactttccatcttcacataaggagacactaatactatactgtgctgatggtagactgtaagggcaagaggggacatcaaaggtatttagatccgttacaacaatgtttagataaaagaaagattttatggtaaaaagtatgtattcaaatcgaatgaaatgtcgagaaaagagaaagagatcgtagagcagactattcacatactagtctgcccgctttcccgttagacacagggggggtatagagattctatggtcacatgataatatgagatccgaaacagatgattaattcgattcgctccgcgaatctcactcggccgacatcaaccaagggcaactgacgattggagcttttactcctcgtgcttggtatcgccattcttggcctcactgctgctgctcatggcagtctcggccttctcggcctcagtgttgacctggaggtcggaggtatcgagacccagttcgttctggaactgggtaatttgggcgatggtgagcttgggcatctcctgtgcgacccggtaaggccacttgccctcaacgtgggccttggcgaagatgatgtcaacctcctcgagatcacgaccggcggtctcacagtagaagaaccaggcgaaggggatggcgataaagttgataagcgcgaagaagaggtagataccccagtcggactggttggagaacacaggagtgaacatgacgacggcgaagttggtaatccagttcatgcaagtggaagcagaggcggccttggtacgagtacggagggggttgatctccggggggtagatccagggtagaggcagcgtagtaaaggcgaagaagcagatgaagaggaagataccgacaatcgcacccttggcgttctgcgagttcgacctgacgagacaacccatggtgatcatgaagctgagaccctgaccgaggaaaccaatcaagaacaggttgcggcgaccgaccttctcaatcataaagaaggatgggatagtggcaagagcgtagacggtggcgaaaacacctcctagaaccaggggaagcttgccctccatgtgcaagttctgctcgaatagcagggtcgagtagtagatagcggcattgcaaccagtgaattgctggaagaactggccagagcaaccgatcgccatacgctggaagtgctgagtcttaccaccagtgaagaggacacgccagctactagcctcaagactctccatggccttgagatcagccttcatcatgttgaaatcggcaagcacatcgtccgcatcgacagcactatcgttgagctgcgcgagaaccctgagggcctcctcatcgtgaccctgcatgacgaaccaacgaggcgactcgggcagcataagagcaccaccagtgacaagcgcggcgaacagaatctggaaggcgacggggaatcgccactgaacggagctgtcgacataagagagaccgaaatcaatccagtaggcgatgaaggtaccgacggcgatgatagcaccctcgaagcagacgaggaaaccacggttgtgagcgcgcgaacactctgactgccagacggggatagtcgcggtatccatgccgtttccaagaccagagatgacacgtccaataacgaactggcccagtccccagtggggaccgaaggcagcagtagagataactgtaccgatgatcatgaggataccaccggctaccaggagaggagtgcggccaatacgctgaccgtacatcattgtgaagatagcaccaaagaaacaaccaagttcgtaacaggcagtgactgcaccgcgcaggacggcgacgtgttcagagtcaccatggagaggggggaattccttggtgaactggtcaccagagatgataccggacatcaaaccctgatcatatccgaaaagtgagaatccaacgacggatgtgaaggtgatagcaagatggagcttcttgccccgtaagccggaggttgtggtccacatgatcaacgtcctctattagatgagagggaaataccaaagcgacataagaagaaaaaggaagctcagacaccggggggaatgtttctgtaccttatatgcattcagtgcgcatgtccattgggttagtgccaagaagagaaaagttcggagtgacatcggcggcgcttcaacattggataggcaagtcttgcgacccgccgtgggggcccaggaggggctaaggagggggccaagggccaaatgagtggggttgcggggatgcaacaagcaaatctcgcggtctgccaagtgctccgagcggcgtgtgtttaccgttttgggccttgggttatctatctcactacactaactgagcaacgttacatggaatggcgtatattcgttaagatagcaggcttgctcgtcttcttattttctcgtggcttttgtggggggtggatcacaattcccggggggcgtctggaggcgtctggaggtgagcgacgatacttagccggaaagggaatcttacccgaccctccacgacctccgcggccaactccacgacctgcaagtactgggggaataagaaattagagggggggggaaggtgggtcaggggccgaggatttcattgaatggccattcgtcgaccgcaattggcagtccattggtttttctttttcgcacgctcggtgccgattggtgtggcccgaatattacgtattcccatgcttccaacgatctcgtgaaagtttccttttttcttcggaactgcgtcgtgcccgatgccccggccggttacggcgacgggtcagccgtggactgcaataatttcccggggttctgaggggatgccgtcttgagcaatgatcatcgggatcacgagccatattcttctccatattctactccatactctactccatactccgtggtcacatgagaactgtgggatgtagactaacggcttgcggactcaacaacagaacgtcccatctacggggtatgagtatgcccgatgcagcccttcccgaagacaccatcccgaagaagcatcccgagaaccatatcaaagagagtcaaaaaattggggaggaaaagtgggcggacccattcgccaagatgattccgcattaggaagggataaccatgtcaaagacagcggatttcgaaaacttttacaggtcaaccacacttccaagatcaggatatttgcttactccttcttggctcatcaaccaagccttccaagtacatttccaagaaaattccaagaaagcgaagcatttgacaagcatagcttggttatatgcctattctggccatacttcatacgccgtatgggagaaaaaaaaaattattcacctgggcccacacaagatttcgggaaaacactgaaagtcaagcgggcattatcgggcacttcacctccgatttgatatcttcgccagtaaaatctctgctcgtcgggatatgaaaataatggaacctggattggtagacgtgcatgtgagcagggaggtacaagcctatattaattttcctattggaccaataacacaattccccgagtggttgtacatgtaacatgggcgagacaaccctcggtaccttcgcgaatcagaacatgcgctctgtccgcgatgatgccatgttagatttgagtgcaacgtacatatctcttggcacccgttaggcgtcgtcgcttaggagggtccccgacatattgtacgagacgagggggagccgatacttcgcgggagtgcagatcacggcaaggccgttcatagtccaaagcgaaactcctaaaacgtcatagtaaagcgccttctaagtatgtggcgcttcgagggccttggcgtgccccctcaagttcctcgtgggaatcatgggaaacagattgccatgtggccagcaactctccgcaaaacttccttgagatctgagagacctcgggtgttacttggaaatgaatcccactatccctgattggtttgtgtaatgtcgatctccgttgagatctggcagatgtgaagccagattgatcagggtagtttgagctatagcaataatgtctgtaattggattatggtaaaaagaaatcattgaaatacagaggtttgatcgggtcggcattcaactttgggcaatgcgtcaaagagtatttcaatagtagtttcagcactatctgaaaagtatcctgccaactctacatgagggcatcggcggtgtgacatcagtccataaacggtcaacgcgcttggactgcacccgcccatattatatcaaaagcatatcagaaaggagaaaaccagctttgagatagagggtcgtttctacactgttgtactcattttattatcgatctgtctatcttagattctgtcgttcaaaaatcggaggattattagtggagattgtggagatacatatttcctggggtagaggtaaactggggatgcccccatactcatcaacatagtctgtagatcgtacattggaagaaagtcacaacattcggatccacaatgattgtgacaaaatcgaagaactattttaatgtggtagaacaacatagtattcaatcaactttttaaacactagggtaactgcttatgttcacatctgacacggtgacagtgtatcatatatatatatatatatatgtcgattattggttcccagtgataccagactgcttcttaccgtgcttctgtaaattattagcattagaatcatcagagggaagaatgggaaggcttcataccagagtacgcgagtacttgatgcccaggttgtttccactggcctcgtcatacggcacaggactggtgtagtcgcgggtagcgtgaagaccgtggtaggtcttcttcacgaccttagcaataccattaccagcagagcactcgccatcggtgagaggaacgggccacttggcggaataatgcgagtcagacagggggccagggtaagtctggttgaggtaggcactgctgagatccacttcccagttgacgtagccggtcctttcagcgacaatgtccagcaggttggcgccacaatcccagcggccaagcgatggcagaccccagttagcggacagggaggcaatgattgagtagtgtgtgtagaaagtgtcgtcggtggtacccttcaggtgttgggggacagcgcctccaaccaggacgctgaagacccggttggggtgggtgtagttgcctgactcgtcaaaggtgagcaacaccaggctgttcttgctgaagtattcgtttttcaacaggggaggcaggaagctttcgacccagttgccggccacaccgatgttggtatcgtgagcgtcgttggtcatgttcggtgtgatgaacatgtgttggggaaggcggtggtgttccaggtcatcgtagaaagtggtgaaattcttgatttgacgcgggcgcacggcgtcgttggtaaccgagtcatacagaaccagcgggttgtgcttgcgcacgtactggttcgcgccgctgagggggtaccgcatgccctggtagccggcatagggcatgtcctcttgatactcaccccaagcgatatgcctggtatcaaacagatcggcaatggttgagacattggcggggatctgcaggaagtcgtcactgtccatgccaaatgtgtcaccaccggcagaagcacagtagttgggttccgaggggtgagtgacggcaaagtagttggtcaggaggataccctccttagccagcttggccaggttcgcgtctgcagcagcggtttcgtagtcctgcaaaagggtgagcacgtggtcattgctcgttatgcaagggggggacctaccgtgttctcgagccagatgttcacaaatcgatcaaaaaccaagcccctcacgtttgacacaggagagtaaggccgggctgtaagacggtctgcatcgatttctgcctgagtcgggttcacttcagtggtagtcttggccgcagccagggccagggccccgacgaacgcgagaagagtctgcttggtgaacatatctgggatcgctgtgatgagatagacaacaaaggagcagatcggtgggtcgaacacgcgatcttatactccagccagcgtcggaggcatgacattccccccatcggcaaaaatgcgctatgttacacggcactcttaaccgacaccacgttgtgatcgatgcagggctaactggctgtatttccaagcgtttttttctcccgagctgtcaaggcttgaatagaactgacctgaagaaattagagtccgaaatcaagttgatttgattggatgaatggcagatagtggaccgggtacctgcccgccgctggtccctgcgttgcacgttgttactgttcgtgccctcactggctgaccccctacgctcactggcccgccccggtcaggaacagctctgggctgaccatacactcaccttccttgagcaacgtgatcactatatattaatttgtatagtaatttctagattgttaataaaagcttttgccgaggagggacatatgcttacctcttcttggctcagaactacataactcaagtacggagtatgtgtagtattacaacaataatgataatttatacttactgaaggggagattatcatagacaccagcaacactcatgagtaattcttatatttcgtccttgcttggtaaaatgactgatatttaaggtgagctcggtatatagtacaaaaagcacttggttcgaaaaatagacaattcaaagccggttagatatatcatctagatgattcgtggatgccacgggcgaggaattatgccatttggcacttaattttcactggttaatactacctgaccgtatttactacgaagcattcatggatatatatatatatatcaggatgcttatcttctaagttggctatgataaatatgttaccaccatatgaatatactctttagaagggttttggctaacctctgtggtaggaagaatacttctacattaaaaagacaactagaacgagaaggccgtataggcagccgactatttttgtacccgtagctctcgcctgtacgtgcaaagatcgcgtgagtcgggaaggaccttggatttgttttcttcctttgtttctccatgaatataaggttcgaggctatttggtaaccaatgatacgacaaggaagagaataagagctacagtttgtgaacgaactgctctgatttaagttaggcctgagacaaacaggcacataaactttaatccaacctctaactccgtaattatgcgtgtatgccctaaaaattggtgattctggatcttctcattaacccttaacacagcgcaccacggctgtcatgccaatcctaagactatgggcaatttcgatggctctggtgaaggctatgaagccgaagcattgtagaatagctgagcttttgcttagacccacatacttttcatcaaattcaaatatatggtgctttgactttgacttcctttcaactctatccaagtagagctatggtggagttgctatgtgtatggtgatagggagctatatgacactaagagaagattcaccggagtttgttccttcggtttcaaaatacttataatatggaagggaggatagattgttttctcttgcaggtcacaatagtccgtatagcttctttgctgtcttaatctaaacgagtcaccgaggttcgcaaatacttgtagctttaacagcatgtgcgccgcgaatatacagagaaaaaaattcacataaaaaagtaccaatcctttgctcgttattcttgactcaatgactattacattgttatcttgacaggtaaaaaaaaacaacagaaagaaaaaaattaatggcaccatcaattaggagaaagcggcacgcggctcgttctccgccgacattgggccagacttgagccaagaaaaatcccctggtgacatgcggagggtgaaaagaaacgaaataagatgaggacaccagggaataacgtgcacgccgggagtaaatgtttttttacacagaaagaccgctaacaccgttgttgctcaagatttactcaggcttcttgccaaccatgaggtacatgggggtgaagaggtttttctcagcaccttcgaccagacaatcagcagccaaggccagactgtcggcggtcttctgggaacccttggggaagagaccgatggactcgccggcaccgacgaagcggtgggcaaggccacggccccaccaggtcatgcgagcgatggtgaagaagtcccaggccgagcccatgtgcttgaaggaacccgccagcgggtagtaccagggaatagggtcgggacgggcagcgagatcctcgtgatgcttcagttcaaagccagcgttcttcatggcttcgagaccctcggagatacggaccatgttggagataccgtcaccctgctcgataccgagacggatgcgacggtgctcaggatcatcgttgttataatcgtcggtcatgagccactcgtacacagcgaaggtaccacctggcttcaggacacggaagatctcgctgtagacaccgacaagctcgggggcgtgaacagtggcttcaatggcgtagacggcatcaaagctgttgtcggggaagttcatctgcatgaagtcgcccttgacgaaggccatcttgtccgaaagaccctgcttttccgcgtagtgggtagcgcggtcgatctggtagtcgttgttgttcagaccggtgacgtgagcaccagtgaacttgaccatctcgcgagcagggccaccgacaccacagccaacatccagaaccttcatgtcctctgtgataccagcctggagggcaaggtagtgctcgtgacgggcaatggcctggtggaaaggctcaccgtaggcgaaacggcagaaatggaacgaagaaccccatccatactcgtagaagtcggtagccaggttgtagtagctgtaagagaatcattagtatgagtcgcgttgatcaatgggggttttccaaacgtactgtctggtcaaggtagcatattcagccttgcgggcctataacacagaaaaagttagcgataaggaccaattgttttggatgcctactgccatacctcacgggtctcgggtgtctcatcagcggcattctggttgtcccaatgcttgaagtactcatcgacggcggccttctgggcggcggcgtcctttccgcgcatagcagcaagaccaccctgggccttggctgactttccatgcagagccttgttgaaggcagcgtcacgcgccttgtcctcacgttccaatacagagggagccatgttgaaggaatgagtcgcaaagattaaaaggggtagagtaaaaggaggcaaaggcgtcaatttccaagaatttcctcgagaaaaagacaaaaagacaaggtaaaccgagattggaaataccacaagagaagcgaagcaagagagcacaattgaagggaatggatagcgacttggagaagtaggagaaaggggaaataaataagagtcgaatcccaagcaactttttgacaatccaaagtggagagccaatcagggggttcttccgaacgactagaccgagccttagtgtcctccggggggcagattggggagtggccacactctctttccctcgcgggacagcaagttccggcctgtggctgagtcggacgctgtacctcccggtgggaaaaagggtgacctgaggcacataatcacgtgatacactagccacattgtggcacacgccacttctatcaatcttgatactagccttggaagctctcacctctctccactgacccatactgtccgatatgcctcctcaaatcaagcatgatttgaatcgatccggctgggagtcgacagactttccctccgtttgtgagaactgccttcccgaaaatccatacgtgcagatgatcaaggaagatcatggcgcagagtgcaagatcgtaagtcttttttttctgctcccccgaggctagttcataaccacatactaaatatttagtgcacgcgaccatttactattttccgttggaaggccgatcggacctcccgccaaaagcgatccattatctgtctcacatgcgcgcgcctgaagaactgctgtcaatgctgcatgctagatttgtctttcggtcttccccttgccgtccgtgatgctgctctcaaaatggtcgccccaggaccggaaagctccatcaatcgcgagtattacgcgcagaacaacgagaaggaaatcgaagagggacgcggcgctattgaagaatacgaaaagacagacgacaaggctcgtgagcttttgcgacgccttgcaaacagcgaaccgtattaccgcaaacccagacgaatcgaagcacctgccgaggaggagaaagcggaggaaggcacggcgacagatcaaccacgaacaaacagtcggtatggaaatggaccaggtccggttcgcaccagtgaaagccgcgccggaaaccgccttccaggccggggaggacgaggtggtggccgtggtggccgcccattccccagtaccacccaattaccgccatcggctgcagatattcttccccctaaggatcccaacgtcacttccttgtttattacaggcgtggaagacgatctccctgaacatgcgcttcgcacattttttagcgaattcggccagctccggtcgcttatttgctcccaccgctcccattgtgctttcatcaactacgtcaaccgtgcggatgccgaaaccgccgccaaccactgccaaggcaaggccatcattcagggctgccctctacgtgttcgctggggaaagccgaagccactggataatttggaccgtgaagagagaatgcaaaatgcccgcgagggtcgccagaccgtggcatcggttgccaagggtaagcaagcagatcgacaagccattacctctgcaggcgagggtgctagccaggagaaagctcagcctcatgttattgcaccaccgcccggatcgggtgagatccaatatgccagcatgaatggcgattgaacagacttgggcggataccattaaattaaattgagggttcggagcgggcgttaccaaggattgttattctatgcaaatctatgtacttcaatcgaaaataccccgaagacgccaacgataaaagagtcgggtatcttataatacatgtccggtcactgtcgtagcttattttactgtttcatatgccgtcaatttgacatatggtcgtagacttggcttcgactctgaatagactcggagagtgcgctcaaattcaactgagcatgatggcaggaagtagaatcctatcatgacgagcaagccttgtggattttcacattctgatcgccgattttgacagagtcgttatcaccgcgttcaatctggtcgtgaatattgagttctgtggatcaatcgctcgttagtaaacagtttgaatgagtacacaagtaccaaaccacgaaatgcaatcgcgagattaagaaacacctaccccacttagcagcttcatctccctgctctctcgagccctggacgatgttgtggcgcaggatatccgcaacctcaatcccgtgcttaatttgcattccagtgtcgacagcggaccgacggttctcctcaaacttcttgcgaacttcctggcgcgcagcgatgaaaattgggggatcgtctatagcggacgtcagtatgaacagatgcctcagtgacggttgtgttggtcaaacgaactatggaaggccacccgggtagaccggagaagttgccgatagacacccttagcagcagcggcagtggaggtggccatagtgaaaggcggaattgtcacagaagtatagacgtgggtgtttttaggaacaggccgggaagcaggtggcaaactgctgtagatgatccgcacgaacaatgagataggataaagttagagggtggtgctgtagatgcgatgtagaagttgtagttgtctaaagaagaacgcagatcgatcagaccagaaaatttgaatgtacaagtgaacagagaaaggaagcaaggccgggtgccatcaccaatctcaaaactctagaacatccggcccgtgattggctggaggggcggatatttggggcagaaaaaaaaggtatgcaaaaaattccatcgcgggacccgacgccctccacacacaacttggtaccgtcaccaataccattacacaatggctgctgctcaagttgttgacattaccctccctaccttgcctcagggctgggctggtgagaaggatttcaagattgtcggtgctctgtccggtgccaccaagcgcaacgtggagcccgttggcccgcacttcctggctcacgctcgccgagtaagttcttcaaattcactcattcttgtttcgtcagaattaaccacattctagtctcgtcacaaccgtactttctccgaggatgagcgcctccaggcccagaacaatgtcaaaaagaccgagactgaggaggatgatgatatctctgaagatgaggatcctgtcatgcttgcccgtgaggccaaggactggaaggtcagtaatgtaacatttattctggctggtcattttctaactcctagcagggccaggatcactacgccgtcttgggtttgaaaaagtaccgctggcgtgcaacccccgagcagatcaagcgggctcaccgcaagaaggtcctgcgtcaccaccctgacaagaaggccgcccagggtaacagcgatgagaacgacagcttcttcaagtgtatccagaaggctaccgatctgcttctcgaccctactcgtcgtcgccagttcgattccgtcgacgacaacgctgacgttgacccccccactaagaagctcaccggtagcaagttctacaaggcctggggccctgttttcgttgcagagggtcgcttctccaataagcagcctgtgcccacactcggagacgagaacagcactcaggagcatgtcgagactttctacaacttctggtacaatgttgacagctggaggactttcgagtaccttgatgaggatgtgcctgatgatggagagagtcgtgaccagaaacgtcatgtggagaagaagaacgccaatgcccgccgcaagcgcaagaccgaggacaccgttcgtctgcgtgagctcgttgacgagtgtctcgcttccgatgagcgtattaagaagttccgccagcaggctcgtgccggcaaagacgctaagcgtctcgccaaggaggaggagatgcgtcgtctcaaggaggagaaggagaaagccaaggccgccgaggagcagcgcaagaaggacgctgaggaggccgccaaggctgaccgtgagaagaataagaaggctaaagaggccgctaagaacgcttccaagaagaacaagcgtatcctcaagggctccgtcaaggatgtcaactacttcgccgccggtgagcccactcccgctgatatcgacaatgtcctcagcgatgtcgacctcatcatggccaagatcgatgttgatgagcttgccgttctggctgagaagctcaccattgccggcagtgatggcgctgctgtcaagaccgcttggtctggcgaggctaagcgccttgttgatgctggcaagctgaaggccggcgaggccaaggtcttcgtttaaatattcttgtctacccgatagatgaggggtagcctatatacttaggctttcctgatgatgattattcacgccacatagagtagaaaaatggatggtgctcttatctaaatgcagtgtctacctatgtatcactcgtagttcttgtcctcaaatccgcatgacagaacacattggcttcgagactacgctccaactaacttccaaggttactacattcagccaactgcatgtctgaccactcccagccacgtgattggtcatggatcggatagtgcgctttttcatcatttgtttctagggtcatgttctgattgcggggtcacaagcagatagacacgatggatgtctctggcgaaggtcggtttgtttaaaagtgatcccatatgattacaccacgttgactagtgaaggcacttagagcgaccagaactcagtctccggaagatcattcgagttgcccaagacagattacttaaatatggaccctcccaagatatagagcttgaagccgagaatatgcgctatatctccgaaaacacggccatcccgatcccccacgttcacgagacccaaatccatgatggtggcgctaagtctatattaatggactatatcgaaggtcagacgctgcaagatgcctggtccagcatgatcccatcacaaaagatgtccgttgcgcaggaactacgtggatatgtacagcaactccgggggctaaagcgcgaacccctggaacctttcagccataaacatatatacatgcggcgcccagtctaccttgacgagtatctattttcaagattgaggacctctgtcccggatctcctgctcaattgtacgggaaataaatggccggaggataagttggtcttcacgcacggtgatctggcaccgagaaatatcctggttgacgaccatggtcatgtcactgcagttttggactgggaactttcaggatggcaacctgaatggtgtgagactgttagagcgtatactttttgcaacgatattcctggctggaccgcctatctatccgctgttttcccaccgggtgatgcaacggagtatatggctgtggcgtttgctagacatatgaaatgatgagaactggatgcgatatacggatttattcatacatatgaatttattttgctatgaatgcacgcctggcattccatacctcggactgaaaacaagccatattctgggaaaaaagatgcgaataatggctaagaacaggccctaaaatggatacgagactgaattcactagagtatgactgtaatattcctctgtgataaagaagattcgcagggataagttggaattactatgaaaatcgtcgattgtggtgatactacttcggcctgtatgtagtacatcgagaatgagtctagtgatcaaacccttagccccctaggacacatgtcactcctagcttctaatatgttccgagatagtgtactcccaaccccgcgcaaagcatatgttgaccgcggctcaatttcgttgagctccatgattagtgatccaatctgcatgcccaagtgaaagccgaggcggactgacatataatttgcgaacataagtagattccagtctggtttatctttagtgaccacaatgatttttgacccagacactatcgaaattcccaagtcttacgagattcttccattgacggatgtcaatgtctcccaccacccagccggggccctcgaagctacccctgtcattgtggtgacgctaaaccgaccagaaaagaataatctattcactctagagatgatgcatgtgtttgagaagatattttatatgtttgatgttgacgaacgcgtcaaagttgtagtgcttaccggtgctggcaaaatgttctgtgctggtgcggatcttgagcgagggtttagtgaaatgaagaaggagaagaacaaggatcatcgcgataggtaaaccatgaagctccaaccatagctcatatatcaattccgctaataccgatatcaacagcggcggccgattcgctttatccatctaccgctgtcgcaagcctactatagcggccatgcagggctccgctgttgggttgggcatgacgatgtccctgccggctgccatacgcattggctgcgagaaatccaagtatggatttgtcttcccgcgacgaggtctaacgatggaatcaagttcttcattctttctcccgcggttgattggttactccaatgctctttatttaatcacaacgggcggcaccttcccgcctacgtcgccgcattttgggaccttgttccaggagacataccctgatccaaatcaggtagttgcgcgtgcgttggagcttgctacagaagttgcagagaacattagccccatggcatcatatctttcgcaggaactcatgtggcgtagcccagggagtgccgaggagactcacctagttgattcagcggtgttgtatcatatgtttagtgggaggtatgctctctccgtctcgtttcatttagccttcttgggaatatttgcattataagaagcaataataaccgtgttatagggactcaaaggaaggcatcaaagcattcttcgagaaacgaaaaccagttttcaatgcaactcttgaggttgatgcaccgcccagctttccttggtggtccaatgttgatatcgggagacgtccgaaggcaagtaagatgagtaaggcaaaattgtaggcaagtgccactgccttcaaccagcccagaatgtgcacatttagaacgggggacgagaaatgtgattctgtggcacaaatgtgttctgagaaagcaaccttgtaagcgggtccgggatgtggcggagcatccctgagataaagttgaaacggaatctgacagccgctcattacggtctccataatttccaagtttccagctccatccagctgtaggtatctagctccactttcttgtaactcaaccttatctcatactttgagctctacaaaagttgactagtttgtagatgttgatcgctcaagaccacatgagacgaatgttgctatcactacagtatcggcacgagcgcttggtgtataaatagtataaataggcaatctaatttgatgttgaagtatctagatgatgaattgctaattatttacgaactctgccatggccttctttcggtcacttgagatgcggatgcggtcctaaacacagaagtcgacgatggcattggatgtagggacaccggttcctgcagattgccatttcgctgctcggagcgctctttaatccaaggccggaggttgaaaataccgccgcagatgaatatgcccacccaaagggtcaattcagttccataaataattatcccaagagcagaaatagtcgatccaaacactgcttgcatattagccgctgaccatctctacctaacgatgaagttgacctacagacagagaggagcgaaaacaagtccccagcagcgtcaataccgacaaaaatgaagctgattcctcggacagtccggtggacatagatatcccagtaatgtctcagtacacctgctgcaagtaggcacgcactcaaaactgccatcaagatgagaggccattctaatccgcgccttttcgcagcttgcaaggcaaatatgagtcctgcttcaatgccaccgaacagcagcagaagcgaagtgactgcgacacagcatttcatgattcggtatttctgagtttatatgagtattatgaggataatgttgaatataaagcaaagtgtttacctttccatagtagagacactgcgcccaagtaatcaggctgagtgtcattaggatttgaggctgaatcctcagggcaatgttgaattcttccacaatgttgtacaccccgaggggaacccctgcggtggcccataagagcatcattgacccttgtaggccttcagtgtcatgtctcctgtaattgatgactatttgaggaatgagctgtataatgtgatcagtgcgggctcaaaagtaattggcacacagcaaccgcatacttggacagaccagcatacctaaagaatagttagtccgctctaccaatcgggaaaatcgggaaatagaacccactgcacccagggtaccgagaacattctctgcaactcgattgtccatttataagaggcttcgtcgctagagcggcggacacacagactgagaacgagatctgataacggggctcctaagtttgcagggtttgcactattatgcctgaggcaacaacttggcgatgacgcacttctcccgaagtcggcagccgcagcgcttgctaactaggcgtgcatcagcgaaccctggacgatccttacctatagatgtcacacgtgaaggtgggctatttcttgaactgtctatgaaagtggatcaaagtggttcgagtgatcattgactgacaatatactatcgtgtttcctttgtcaatattaatacagacaggttatgtagctagtgttctgtgaatatgacccatctcatatctcatagccaaattctgtaatgttccggagtattttagcgacatgtgtgatcgagaaaaggtacacgcgataactcagggtaaaaaagcacgctccatttaagaaccccctatctacggagtactccgtactccgaacttgatttgataaaagggctgtgcgtgactagaccctgaaagcattcaaagtccagggatcgatggcgatcggaattcaagtccggtcactaatagggaagagtcaaccaaaagatgggttagagaatttacctttgaagtaaataactgtacaactatgttggccagggtggaagcatttggctacaagttacctagtagtttagatgtatgacaaccttgaaagaaaccctaagatgagatcaaacaacgtagaaccatggacatgaagatatcaagattccagggtttctctgccgatcggataagaaatttcttttcttcccaagtgatttaccttgttttttttttccctgtcggctgggaggaccgcatggttgccacctgtgccacctttttttggaaatccagccaccatatttatatcaaggtgtagtcgatataaatagaacgagtctcacgaacatagggagtacattataggaactggtggtgatttagggacgagtacgtatgcatctgcgtaagagggggtcccagcccctcccacttacctgaataggactaaatgatcatcgactggggatgatatcatcaggaatgaaaacccgttgtcggggaggttccacattagtacggagcacggggacggaggatgaattcctgataggagatctatattatatgcatgcatggctgggttcgaccggagtcaagaagtatacatgtggatgcccggacgtaattgatgcttggcaccttgaaacatattctttttctacttcgtacttgcggagtataggtaataaaggaaattcctaatcttaaattcggtgggtccatcataaattgtggactttcccctgtcagtctaaaaagacccttaagaaaccagccctcctttctccttgcgctttttcaatcgtctaccaaacacgccttctacagtcgtcttcaaggcaccatggtctctactcttcgcctctgcctcttggccgtgactctacttttcaacttctcctccgcattccccctcatcagccgcgacgtccaatggtccttcacccttttcccgtcagcctcatgcaacggaactgtcggtgatcctcacgtcggatctggcagcacaggctgtcgcgccgatctctacagcgttgcctctgcctacattctgaactctctcgccgagggctgccgcatcgagttgttcgataacaccatgtgtgaccagaacgaactctccgacatcgccagccaagccaatgccacccaaacttgccgcatagctggaacgagacgccactacggttcatatcaggtcacctgcgcctgaacatcttcaaacctcttttcgaatgtcgctgtttgaaacagtgaagggtctctggcgggctcctagatcctatgcgcaatttttttgaaagtctgaaagatcgattgggatccctcggtgggaaagtataatatgtatagactttttaatgatacccttagattaaatgaaatgagtttacgatcgtcgatataagttgcactcttttcctgctatttactcgtcgatgtccacaactgccggtctgcgtgttctgttatctgtcgtgtcgggcggcttctgtcaataatgcaccatggagattataaaaatagagaatttgagctgtccgagatctgctcactgtctcactcccttcatagcagcgaacatcatacgtcggcctgcaagccaggatcagcttgatgaaatatgaggacgcgcaatggcgggtaacctgatacactagggatcattttccttgcaccgtttaaccatgaaacattaaaccactattcattggaaacactgttctcaaaacacgtcatataacggtcttgacttccaactccatggttgatagattgacggatatatattctcctacgccaataccgcatttacggatatacatattcctgcgccacttttctcgagcgtggcgaggtttataccccggaagacaaacgtgcagactcgtatgcgtggctctcattcgctagaaattatcagatcttctcggtcttcttcggagttaaggcatgggctttccagaaatggataaactccgagggatatacgccgcaagcggatggacatttttggacctttattaaggactattcgcgcttctttttttcatagtcgcatattccctacaatctgtttgattatgacagtagtaaaaactgagttggaaagcgacaccagcccacctgcggctgtatcattctttgatccatctctcaatgagattcgaaagcgggtattctaccaatgggctcgcacttgtaagtaaagtctagaatacggcaactcacggaatgcaagagaaattaacggaaaacaacagtattgattctgtgcgtcttcgtgtatgccgtgctatctctcttctggggagtccagtacggcactgaggacaagttcccagtgctgaaggtatgggttgtcgatttcgacggccaagttgatccataccgctccaatgataccatcgttggtccagcagttacggatgctgccaagagaatcctgcagtctgacagcctccacctcggctacactatcaaatcccccgccgacttcaactatgaccccttggccgtacgccagggcatctatgacgaacatgcctatgccgccgtgatcatcaagcctaacgcaacaacgttgctccgggatgcagtcaccaatgacaatacaacctacgatccgactggcgccatcgagacagtaatcatctccgcgcgcgatgaaacaacctactacacctatatcatgcccgacctagtcatcctacagggcatggtgctagcagagttcggccctcaatgggtccaatctctcacttcatctgtcagcaacctgtcatctgtgcccccgcaggtgatcaacccggccattgggttcacgtccatcgatctacgtccttttgccccggctgtcgctacgcctgccgtcaccgtcggtttgatctatctgatcatcattgccttctttaacttcccctttatgatacctattcatgctcagttcatgaaaccagatggccatccaccgttgaaggtgccacattggctcctttggcgccttttctcgagcctggtggcttacttctttctttcgctgtgctactcactggtgtctctgactttcaagatcccattcagcaatgactctgcgcctgatgttctatccgcgaacaatcccaatggctatggacgtggctcatttgttgtgttttggatgctgaactgggttggcatggctgccttggggctcccctgtgagaacatggccatgatcctcggcttcccatggagtgctttgttccttatcttttgggttattacgaatgttgcgactgggttctatgccattgatttggctccgaggttctatagatgggggtatgcatggccgttacatcgaagtaagtttccccctcatcgtgatcgatgctctgttgctaatgatcatctagttgtcgaggctctacgaaccatccttttcgatgttcattcgcgcattggattggactttgctattttgttcatttggattgcagtatccttggtcttttatcctgtcgcgaccttcatcatgcggtggaagatgctgcgagggatataaaatagggctaaaatatgaagttagcaggcagtaaatagacagtgaataggttgggacagtctacggtagccactggccgctagtgcgctcaggttgtgcctgcagtacatatagtatagtttgtaatatcaggtatcttataagattcaatacttccacctaattacatgtattatgaagttatgactaccgagaaatgcgaaagtgatatcttcaaagacagcgatctagccgcagagggagcttcttggctcaatcattgaagcctgctgagtcgattgaggtctcaactacaagtttcgttgaagaaaggtcttgttttattcataaattcagtaatcctcgccttgtatatcaatagccaatggctacctgttcgctgtagcttcctctctggttttagcttaatgtatgtaaattccaggtctgtctggctattacgatatgttgttaattttccatatcactccttaatttcagttaggtcacgatccatttcaatcaatcaatgttgtttgcttccctgacgttgccacgacaaacacacccatcccaccttggcagtcctcgcaaaccttccaacctctactcattgcttacttctacctattgataattcagcatggcgcgtatggtcacaaccccgttccctggagaccattctacgaccacaaagccaaaagacgccgttgaccagaaacgggccgcgagcccaagtactagccaggacgtgctcaaccctaccatatctccaggacaatcgactgatgtagcaatcgaagaattcgaaattacctctgcactgaagctcatagccgtctcagtggctcagcagcgcttcctcgccgctaaatccctcgtccttcacccgaccaccctaaccctggtagccgcgagtttcgcatacagtgtcggtgtcatttatcatcacccatcttgctggccctacattgttgttttctgcaccaccgcggtattggccactctaggtatcgtcacacgcttgcttgagggatacaacgatgaggctgagaaggttggaacactgaactggctgtacgggcacgatcctagcagcgataacactactcaggaagatcctgccttcaactcggatagtgggatcacctttgtacttgtttatcgattcgggcgctacattgtcggcgcgcttgtcatgagcatcacctacaacggcatccaaccccatccgaaagccaacgcaataactctcccaataggagaaaactacgatgcctgtgtacgtgcctggacagtccaaaaaggcttccggggatacgggattggcactgcgctcctcaacgaagctattaggatctgctataagcatgagtggaaaggactccggttcgcgacttcccacgccaactcccttcgcgtctttcactccctctttcatagtgacatggaccaggcgtccgctatatggagctcgtatctgcgcaagcgggtcgaggcttatcgccaatcctgtgctgtttctgagactagagttcttgatgcgtctctacatgcgagtgagagccagagcacgctgagtgatacacggatgcggtttatttgtaccgaggcggagaagctcaaccggatgtacttccatgtacgccttggacaggtagttgatgctcaaactcggtggaagaaaatcttgtaatcggtcacgcttcattgttggcttgctgtttctggatgtggtgtcggtggagttcaggagtattgatgttaaggttccccttctgcaatttttatctatctatatggatgattgttgcaccaggaactctcatagtcttatgaagaatcttggaagggttgttaccacgtctggctgctttgactacagtggtagtgttttgtattggtttcattgtccaagcctgtaggaagaattaggtttcatcttcggagccaatttgtggcggtgactaactagtcctagtgtttgtagtactaattactagctaactagttactcaagcagtttctcaagtggttgcttgagtagttactaaagtaattgacgataaagcagttaataatgatatgacaaaaggcatttaattttattagtggtttacatacaaattgtaggtacctactgccatactatcatatggcaggaaataagcctaattgtgaacgcggtactgaaattacaggcagggggagaataagccagtaagaggggggctttgtgtagcattaaaagttggaatcagtcgtttcgctctgcaacgactatctggaggccttaggctgtcgagatcactagtatattttccttcacgctaaattagcggtcccatttcgacattcgctcagctgacggccgccaaggacttgctcgagtacttgggagcataggcgcttgaggcatacagcaagttatttgcctcagccaccgagaggaagcaaaccctgcaaacctctcgggagcacagcggggaggaaaaagagctcgtgacggcgtattgaggagctaaacctcataagtcaagaataaccagaaaaggtaattcacagatgcgccgtttacagctacaatatgagcaccagggggattgaggccagaaatggctgcctttccacccgtaattttggacgtccagccgccccatgaccgccataacgtgtaacaccactattctgtacctacccagcacttttagtcaccctccggtcctgatgttgaagtatgctggctatttgagcctggaaatgtaaagaatgtaatgcagaatatctgatatcgtccggttcacgaagtaagctagggaggcaagatttcatggcaaaggagtgagtccaacgagattgagacccgctttggttatgatctctcggagggacgcaatgtcaaattcaagccgatcactgccctgggagcttgaggcaattgcgccgttaaaaatgtcgtctttggtgagataaatgggcagttcaaacgccccatgaaccgggaaaattcggttgctcgcaatcatgcatgcactgcctgtagaatttcgcccccagagttcgattgttccagcaacaccttgtctgcgctggaaaaatttcacaagaagaaccttacacacacccactccttccatcaaagtttcgcatcatcaacgaggcttcgatatgtctgattgaagccaacctcaataattatccttggttcatgcaagtaaggaagtctgaagcaagagatgaaggtatcgggttctttttgatcaccggtgtatggagggttgctagcagtaactcgcgggcttgctgtcaccataacattgagatgttcatcaggcataagttgaccgttgatattccaacgggtcagctgttggacaaaccacgcatgcggggctgaatcggtataatttggcattttcagtgttataactttcctctgggagaataatccttttcgaacacgggggaactttgcgtcgagaagttttaagatcaattgaaatttcatgatccaccgaggtaaggacaacaaacgagtagagagactggtcgaagaatccactgccttggattatcgccaatgcctcgtcggcagatttgattttgtcaagggagatttctttgtcaagggcgtagtcttcactgccagatgactgttcggaaatctcgctattggctggcgtggaatcgattggtgaagacatgatgtgcaaaagaaaggagggtgcttgaagatggaaagtgcaagtatggaagtcgcgaagtgaagtacaattgggacacgtgatcaagggaagcactgagattctattgggtagtcgcacggagatgtactctgtagtgtacagtaatataacccttgatctcttccctccttgcttgtatgcaaatttacgtatgcatagtacttatcacatgcacttgatcgcatatattctgtaaaacaacaaaaatacataagagagggctgaaatcaaaggtttcagcccgatactaagtatagaaatcgggccaagtcacattccaagggaaggcgctcaatgtctcagatagattgacccatcttacctctttgttttgcatttgctttctcgtcagactattcaaaccctctttcgaattcaccaaatttcacggttcaaaatgtctacgacttcctccactacctcgtccgtgagcacaaccagtactgcctgcggtggcagcgtctggcaaatcccaacaacagactcagcttgtgcggccgtcatcagcggaaatatgaccgatgtgatggatgaatgctgcaaggacgcgaaggtctccaagtacgacaacgactgcggcatctactgcctcgcgcaaggccaaaatgtcgacaagcttcagtcttgcctcactagcaagagtggcaactatcacgatgtcttttgcaacgccgctctcaatgcgaccgctacagccacagcgacgggctcaaagtccacttcctcaggcaccggtagtagcacgcactcgtctgctgcctcgacttccacaaatgccgctatttccaaccagcctatctccaagtccggtgttggaatgattgcgctccttttcggctctgctttgatggctgttatttcttaacttggcggatgatttgatgtttcgtttggggattcaatgcctgtcccgataaaatacaatgtttctttttctagcgaacaagcgaccgtgttttcttactcgcatctaatacgaagtatgatttgagatgcataatggaatttgcgcactgcaacgatcaggatatattgagaaacctcatgacgtcatcgggttgcactgaatcagcatctgtttatcctgcccctccactgaagatcagaatatcactactccgtagatacaactgtgttcgaaaatgtcatcaatcgcaaagactgtcatcgcgacaggcacctcgtccggcttggtaagaattatatgcccttggaatattcaggaatattcaggatcctaacatcggtcatagggatttgaaacaatcaagcagttactccagcagacacagccgtacagcttcattctaggcgttcgtgacacagaaaagacacgagtcgcgtacgatgatctgaaattcgacacttcaaagcacagcgtctctatcttgcccctggatcttctgaatcttaagagtgtgcagagctttgccaaacaagcactctctgaattgggcaaaaggccgttgaactatcttttccttattgcggggttccttgccagcgctgaagggccggggcctcatggctcacaatggtgcgaatcatacgtggtaaaccatctaggtatgtcaaaacgactcatcggctactaaaggagtctaggaggctagagctaatcattcatctatcgcaacccagcccagcattacctgacacacgaatttgctgagaccctgtctgcctcgcgatcacgtatcgtcattgtgtcttcgggtgcaattcgtaatgtgagaggaggcgatccaggtgagtttagttccattctcccagttgtgtcgctgtccgaagcaaagttgttcacaaggctgacttcatattagccactcttgaggttgacctaaaagcaaactccggtgcaaacgccagagtagtgtatagtgcatcgaaattcactcagcttctgggtgcacactactggcgtcgtagcctcccaaattgcacagtcgtggctgtctcgccaggtctcatccctaacaccaagcttgcccagcattcgagcttaggattgtccatggatatgcccgatgccaagaccgtgccagagggtaaggatctttgcatttggatttttgatttgaagacgatatctaacaattaataggtgcccagaatatcctccgcgcggtcacggtcgagaatcttcccgctgacccggaacagattttcttgactagctggggtgaatggtggcccaaggatgtctatgcgttgagtcttgatcctgcgctgcaagacaagtggtgtttgagcaaggaggatatcgagaagtccgagcctgtgttcaaggaataaggagcatagtatgcacattttacttcaacgggtctgcaaatagtatatctcacatggagtctgttttgcaaagatactgttccaagagcaatgctattcactcactggctcgcgaatcggagaaaatacgtagacatgaatgagtcgaatttatccctcgtgtagcagaaaagtcttaaagtgggaagtttccttgcgtacatctcaagccaaggcaagtaataaacaacagaaagtactacaaaaaggacatacatattgcacaagcgccgacaaatcgagccagccacaagatcattatatttgcaaatatagaacagcatctatgtgtatatagtatgcgtaccggaatttcccgaccggtcgaaatcaatcataatctaaaatccagtacattacatcaacaagaaaactcgaacctactcagcgttcgcaagcttgcgcatggtagcaaagttgggcgacccgagaccagaaacagggtcccaacccttagtagcgttccagctagcacctgggatcgacggaccaccgttattggcaccaccgaagcggctcttgccatcgcaacccgtgctgccgccatcgacaatgtcctttaggccggcgcgccctgtcgagtacagccaaggattaaggaagcccattggtggtttgttgactttgaggcgagcgtcgttgaggagggcgatgactccggcgaaggcaggtgccgagcaggaggtgccgtcgacgctggtcaacgagcccttatcgtatatagcgtaattgcgaccttgggctgtgacatcggggaaggcacgacccttagggttgaagaggccagaccagcggttacccaggatctcgaggtactcactcacggcctcctcttgccatttcgggcgagcccagagatcggaaaagccgccggacgagaagtacacggcctgttcgggcgcggtatgggttgtcgcgccgactgatgtcacccacgggcaggcggcggggaactggggtgggaagcgggtcgcgttcctgccgtcgttcgtcaggcacgcggacccaacgccggagtcgccagatgagaaaatgacggatacaccacggctaccgagctgcgagtacaagttgcaaacactgcgggcgtacttctcgggaatgctctacaggttgatattagagaccgacaaaatcacgaacaaagggggggtgggtgtcatacctgctcgtcctcaccataggaggtagaaatcacctggggaaggtcctttttgtccagcttgagcacgttctggaggaattcaaggtatggctcgttgttgttatcattgggatcaggctggtcgagatcgggaacaagttcaccacggccgccaacgctaaattcggtgacgggaacaggagagctgactccaacaatgtactgcaagtccaggttcgcctcgctgctgctaccgctggaactttgatcattaagaccgccgttgtacctggtgacggagaagttctggcccttggcagagggcgcgatatttttctcaaatagtgccagatcggagtatcgtgcatactcctctaggtagctggcaaacccgaccttgttcccattggtatcattggcctggtaatcaccgatattatatatatccttgagacactgaggagtgatgatactgttgcaatccggctgagcggacacggcgtttgagcggaaagcctcgtcggattccttgacctggccgtgtaatatgccccgatgggcgcgcagctggccgaaacgggtggttggctggatcatgttgatgtgtggcaccagagccttcgggactgagtacttgagtgtgcgaagacgctcaatgtgcctgacattactgacgtagaactggaaattggctgccagcagctcatttgccgtctccacggtggtgtagaaggtcatccaatctgcatcctgttcgatcctggtaatacccgcgccttcgagccagtcacggattgactccgcggactccgcactgggctgtagcatccgcttcatttcttcgtgggtggtgaagtggtgcccgtagctagggtgatcgggggttgacatctccatcacagcctcttcgaagccggcagtatccccctgtgtcagagcgatctgtaacttcaagggctgatcagcacgcggcctgcgagaatatctccatcctaaggtgggtcagtgaatcaattccgtcggtttcgtttcgaacgcaagttgctcaccttgaggaacagcagacaaactctcaaatacatcggctgcagcagaggacgcgagaagcgacaagaccgcgagcgacaatgctccacgactaaatagggatgcaatcatgataaaaaaacgagcgatatgaggacaccctatcagtctaggcctctgcgcagcgaatacagggagtataaatagtctaacagaagactatcaaatacaaaagaggggtaaagaccgtaaattggtgtttattatggttgcattggcggggggaatgatggggcgacaaagaatgtgtgttgaagaagtccaggataaaccaggacaagacaataatattgacaatggagttctttgatcgaagtttcacgtcattcgcttggcacaacagtggaccctttgtggatgcccgcctggtgagactattctaaatcaataatcgctagtagcggtggctgggattgcatcttccggatctggctccatactcgcatcgtcgcgatatcctttcccaaccggagagcgaatgttactgatggaatcggtatagaagcaagccctctatcccattgtgatattgggcctccgtcgggggcgcgtttatgatcggcaggggttgacccactgtgtttgaaggaagcaatgcgaggggcgtcagggggcttgtattgccgggtggctggatgacttggccctaaaacgagatcagctctgattctaatttacatgaagcccacagttcatctgcgatcagatctgatcgatgggaatccgctagaggatatgttcatgatcaaaatcattcttctcctgccaaatttgggtcgtcatgcaccgttgcaccaggcaattaggctatctcatcaaatttgaagataagcttggagggataggtgctaggtttctgtggcgttgtgatgtgctgtcgcaacccgaatgaccatcggttttatttgcattgctgtgcgtcggggtgcgtcgggagtgcgtcggaggctggggtcacaaaattccaatttgctagtgccataatttaggcactggagacagatgtggctggtgatctctagttatctcccttcattattcgacgtgacatctcagtctcgggtaaaaatggctgggcaagaatgcgaggtgagatgagtacagagtacttgcgacgcttgctttcgtgacacctatcaagggacgagatgatagttcccgttggccccggactgttagcgattctatgtgttgtccgagttatattaaaatgttgacttcgtcgcagacaaggttctctggggttgcaacagtctccatcgtccgtcggtactccgtaccccgtgactttccgccaagttatgtgttttttttctttcggttctctttttttaaagagatgatgatactacatacggagtatatattaaagccattgacttcgattatctctagattttcattataggaaaacgcgacaacctggttacaagtatacaaatccaaccggattatggtgatgcatatgtataaatatgtacatgcctgtcggtccaaaaaaaagtatagcttctatacacaaaagatgaaagcccatggtattatttataatcaacgatgactggagcttgaacaacaggaacagagccatcaacacccacctcattcaattccagatggtgggcgtagaccatcgaggcgatggcatcttcagtctgaagatatgttcggttgcctcggatgaaccagaatgcaacagcgatgaccagcataacgccaaacacggcaatggcaaagttcatatcactgggcgccgggttggggctgccagggaacaggaagaaaatggtagtgatgatacagtagaagatgctgacccaattcaaccacggcccaatgcgaccgagcttgaatggacccgggggcaatttatcacggccgacgacgagcaaggcaagaatcggcatggcgtaggagacagtcagggcaatagtgctgacactgagaatcgcctcgagcacagtgttggcgaataggtataggatgccgacaataccgatgacaatgctctgaccccagagagcgcgagcagggacttgccatacagggtcgacgtggctgaagtagttgctgaaaggcacaccgccgtcgcgggaaaagccccaggtcaaacgggaggcagtggtcaggatactgatgccctggcctagaccattgaagatgaacagtgcaaggagtacagcggctcctttcaatccaacagtctcgacaataagctccatgaaggggaggtcggcgttaacgacattgtctacattctggatgcagaacagacagaccaccatgaagatgaatccagtcacggcaccgaacaaaacggccatccagatgactcgaggagcattcttccgaggcgcagggatttcctccaccatgtgaataaccgaatcgaacgcggtcaacccgtacgcggcctgtaccaagccggtgaaccaaaccacaccgtcgccccagccagtctcattcttccaagcaccgaacacgaaagaagccggctggaatgacatattactcttggttccgaccgagataagtagcacaagagagagaacgatgaacaggccgaagaaccagactccaacaaagttgttaagccagggtaggatcttctccttacggcagctgacgacgttgatcagggtcagcacaaagaccaccgcgatgtacacaacaaaattgagccagcccttgttggctccatcccactcggggtcaaacatagttttcatgcccagcaggaactcagtcatgaaggcaacctgcgacgcagtcaaggtccaccatccaaatacattgatccatgcgcacatgtatgaattgaatcgacccaatggtgtatcccacagtcgatatacccagtaggcctgaccgagggcggtcggcatgctgctagtcaactcgcccagcgagagcgcaacacagaggttgcatgctgtgactagcagcagaccccagaggatagtaatagcaccaccattggtcagaccgctgctgagatcttgggcgaaggtcgaataggttccttggacatgttagcacacattcgggctccatcgggtgggggaaaaaaccgaaaacataccaagtacacagaaggccagcgccagcatactccacatatcgaacttccgcgtcagggcctgggaatgacccagatcagcgagatcctgtgcatcttgcgcatgctgatccgtcagcggtggcttaaggggttgcgaattgtattccaaatccatgccgtggtatttcagccggaggtaatatatgtcaactcagtgggcaaataagagggaaatgcgcccattttctgattgaagatcaatgagaagcacagaggggggaagcatgatttctatatatctggcgtccggcgtatttggttcgccttgacacctcgcggattctgagataaagctggagaccaattgcgagtagccaatgacgcggcggggctgatactaggttttggttgaatcagaacgattggtcatggacttgggagatgttgataatagaaacgatctagttaactaaaatttctggtttttgcggggagtcgccttcgggaggacctcctccagtgggccgtcatccataatgtccacagaaatgcactccacagataagaactggggtataattggaattgaatggtggaattgacgttggtcaagtaattgaatatcatatccaatccatggatgtaggtatttcgcagcttgttcacaaattccatccgccacacgtttcatagctccgaggtccgaccgttgtacctgaacagcttctcttcaatatccattgaagcctaacaaaagtgcgaattccagcaagaaccgcatgatctcaacaactatcttcccaatataaaaatcaatagcattgtaggttaacatcaaaatacagtcagtggcaacggctgacccaaaacggcaagtccatgcgtggccgataagaattaacgattagcggtgcggctccagtacggtttgggtgtcaattcattaaacatgctttggtgtgtaaatagacatcataatagaaacggtagagctgcatatctgcgtttcatatgagacattaagctgcatatatgtggagtcaataccacatgctccgtatgcgccatagccatggcttgaccggcggaagccatcgtgatatcaagatgtatatggggcaacagcttgaaacatctgtcaacaatcagccgagggtcaggtggcaggctcgaggatggctcgtgacaagattctcatcgaaagcgggaaattggacacgatggagtcggaatgcactttgctttgcaccactgaagcagcagctttgagctttgtccggggaaaactgccatcagggtccacttcttcaattgttgtttcgtaatgagaatcaacagccgtcgctaagattgaggaggtctcctcagttgggcatcgccgtagggtcctctcgatccgtctgaccccaaatctaaatcttgcccagctcaaccccacaaaaggaaggaaacggaagatgcaaacaccgagacacggcgacgtagaccaatgaaggacagaccgtagacgcacggtttggaaacagccccgtgaaccccagaatggttcaatttgattatcgccatggtggactcctacccgtgacagaccgacaagctcactatcgattgcatattctcaaactcagttcacgagaagtgtaaagtcgtctgatggcatccgtgcagatgtgtggttgctgcgatattaaggcacggcgcagcctagtcccaacggggagtatgacctattcaccctgatagggccacggggtttgatgagtggcttcaggaatcattccagtctctgctgcctgctataattagcatagtcagccctctgctgtccccttttcatactccttgctcggaattataggcaatctccggtgctatatttcgcttatgctatccgctccccctgatcaaaggccgcgtgccgagtacgtctctcgaggcgatactgtttaacctgctttgtagactcatcatttccgtcgactctaaacccgagggttgaataggctgggttctattcaatgcgtggtatttgccaggtcgaggcaatgttgaaagcgatatgaaagccggatccaggtcacgatacaaaacgccagcataaagtttggcagaattcaccttgctaaccaagagtggccagtcagtccagcacaggcgtcaaagatcacaagacgaaggaacattacttacactgcaggtatatatacgtggatgggaccacccaaggacaactatttccatatcgggaagcatcaggccatacccgcacacaatcaggaaaaagagaaaatttgagcaaaatgaatcatccgagtcttggcaattatattaatgctttaggacactatccatgaggtattccgtccctgtaggggaatcacaagtcacaaaacacttttgtggtcgccaggacacgaaaatcaaatcatgtctgagaagagaagagggccacatgagcccaaataataacactggatccggaactccaaaagaaataaaggaaaaatcaaggaaagaatatgaacgccgaccgggaccacgttgaccggctactctaagaatacaacgctcgtcgcggtcatgagaacaacaaagggaacaacaaagatacttgaagaagcagcagcatcactgtggttggatcggtatgcacctgatcaaagtcgggggtttttggtctgacgccagattcctaccgccggtagcaggttttgcttgagcattgcgagctccttgtgcaaggcctggttctcctgctgaatgctatcgatgtaggtgagggcattgctgaggatctcggacttcttgagagatcccgcgccaaccttggtatgtttttgaacccccgagggcgagatggcctgctcgagagaaacaaatttggcgttcatgttggtacggtagcgcttctcaatgatgttgtgggcggcacgcttggctgcattccgcatttgagggtcttggccgccggttgaggagtggttggagtctcgggagaagctacgggtcttgcgggatgtggatgtggtgggtttggagggtagaggagtagcaatctcttcttgcttcatctctggactggatgaccagcttgctgaagatgagcgagtcttgctctgtgtttgaggttgagacgaggtgtagtttgaagtcaactcggtctcgaaggcgtttgagtcaatggattgacgggcagcagagggccatgtttgatcgtcgctttcgaactcctgtagaaagattagcttctgtgacaaaatattgataggaagggtggacaatcgtacagatgagagagaagctgcgtcctcgggcatggagaagccactgattccggagctggcaaaggggtcgttgaagagatccttggactcgatgttggtgaggctgtcggcgaagtcgaacgagacgggctccatgtcggaggggttgatagagaacaggtcaatcgcgttgtcgtagctccagttggcagcgagagggtcaggtctttcgaagaagtcggctggtcgagactgaggactcaggtgttggctgaggtaggtcccctggtctatgcagagattggggatctcattggatcggttgcaagccatgatacacatcttggatcatacgttggcctcgaaggcaagtttggcagtagggtgatatagtaaggtgaaagagttgctatgagcaaagggtggcgaaagaatcgagtatttataaataaatcggaactgaagatatcatggaacaggatatgggtttcggccgcggggcatttatataaacccagagtaagccccgaaaaaaaacaggggtacgaaggtgatccggaacagattacgcctgtgtacgaagccgagattgacctgtgatgtcaggtttggaccagacgtatcgaaaatggcttagcctccggctggtcactcgcttgcagggttgtcgaagccgagttcacccctaagatctcaaacggccggctccgacgaggatattttccgatgggctgtaacgtgtgaaacggttgaagttaaaaaccgtgtgggctaggccttggcccaagactccgccggccgagtctcggacccgatattatgtatttttgtgtattttgtgtattttgtgtaatttatgtcttttttaatgtattctgtacctcctttcttgttttcacgggctttgtgttttttattttgctcttgctgctttgaacgggtggtataattgagacctggctgcccagcaggctatctacagcaacttggaagccaatgatgccgagtctgaacacttgccagtggttcattagaatgaggagatttccaactatgcctgatattagaagatctataactatgccgttaaaaaatcattctttcatcatagacaatgatactatacttccaagtagtcgactactccgtacctattgaccaattatatcgcacaaccaagatctacccgtactgcgttatacggacaacgcagccctaaattgatcctcaaccgtcttagtaaaagcggcattgtcagaacctatcagtatagtcatcctcggctttgcatcttacattccttacccctacggtaaaagttatatcctgtttcctcatctcgcgtgctgattgcttgcctcaccattatactttttgatagtcacctgtcgtcgactccatcgagccattaattttccgaaagacggattgatatgcagctaacccatgccatgctgcacaaagtctagaagagacgagagatcatatccgaaatagattgatacatctactaatgcaatatacgaatacgtacccgctcaatagtttgatgttcagagtttcttggaaaggtcacgtatattcccgggcagtgctgtcggtttccgcccgcttgtggcaatgtccacgaggcgtactccgtggtatcagttgaatacggtactttatgccgcaggtatttttcacttctgctccgtacatataaaactgatatgtcacagtcagatgcattaaacaacgatgcctattggataaaaaagcgagttggattccgtcgagtacctccgtagtgcctcgatcgcagtgtcgaccagtcgcgaagcagctaaaccccgcttattcacttttttccttcccaaatcggtcccacctgcccttcggagtggggtgactcggaagttctcattcccttgcccttcttcgccttaccctcccgatgtcgaccgagacgatacgagaagctcctgtctctctccatatttttgacctccggtcaacgtttccgcatggcatgagggttcgtctcctgatactcgggtgaatccttttggaaggtcgagtgtcgagggttcttgacgggtagacggaggaaacattgcatttgttagactttgtggcacatctgtggctaatggccatctcattctgatatctcagatctatcacaaccttaaaaaatcttccatgcaccgagtcatctagaccgaggctagcccgttacactctgtgttacggctccaagatgacctcgggagggtcagtccacccggcacgccttgacttagtggagaaataacgggcgctagacctgtcatctgcacagaatgtgtacacggatcttgactcgattccgggcccgactgtcctagatcttgattcgcggcggatctccattagctaggatctttccgaggtttacgctgggtcgatatgacgcagtggcttgatggctttgaggcttttatgttggtatgacccctatatatatacacatcatgaacgtccaggtaaccggactttcttgaaattcggttctatctccgaaaacaatcgattgagttctgaagcatacatgtctaaaaaagctcatccaatcaacgccttgagagtagtttcgaagctctccggttcacgccctaagatctcacgtagagtcggggtcacaaccgcagtctcaccccgtcggatagcctcccaagccgtagcccactccctcgacagattgacccccctgtaggtaagatggtcaccaatctgaggaagattcacgaactcatcgacagagatctcacggatcttgagcgatttcccaatcgcccgaccgataatatcaaccgtctccgcaagagagatctcccgaggcccagagagcagaagagccttgttcaaatacccaaagctggtcgggttcttgacatacgaggcaatcaacttggcggttgcctcgcccagctcatcgcgcttgacccacgccacacctgggcctgtacccgagtgagggatcgtaacctcgtccgttggatgcttcggatcgaagaatgcggtatatatcgggaaggattcagtgtagagaccctcgcggattatggtgtgggacactttctcttgcagagaagagaggtatttctctgtctggatatgggcgcccatcacatgagcgacactctggtcggttagatcaccgccgaatccaagggaggagtaaaaaatgtacttgacgccacttttgacggctgcatttatagcaagaatgtgtgcctggttatcattatcagcccaactcctccgtacttaggtgagctatcacacttgattttcttaccttggtcctgtgatctatctcgaatgatgcatatgaaaccagcatcaagacatcgacgccttcgaaggctgtgtctaatgttgatggcgcatcatagtcggccctccgtatcgtagcaccagcttgctcgaggtcgtgcagtttctcggggtgtcggccaaccagaacgagatcggattttgggactagttttgccaggtggttcacaatgcttgatccaaggcccccggaagcgggaaagacgccgattttggtacccattttgatatgtggcgagaatgatagaagggtaactcagtagtctgtagttgggaaggtatatataaaacacttgactggaggatttttcgagcctcttatatcctacatatcacatttcatgatcaaatgcttacaaatcgatatcagtccatggcaacaacgaccggatgcgatgattgtacaatattctctataattccatggatgtcgatccgttgccttttaaacaaagaatgttgcgccaaccttcagcgctgcctggaaatccaagtaaactccacccaactgagaggagtcacccaactgagaggagttatcccctttaaaattcattgcttgctcagcagatgggcaacctttaagcaaaggatcttgtgacttctttcattcgtcaatcgtaatttgaaatttcaagagatgagatatgtacttctaaatgcgaaacaaataacggccagggaagaaacaattagtctaattctaatcatactccgtgctcaatgaatacctcccgttccgaacaattccatcttgatgcgatcggcactcacacccctggccttgagactcgactccatatcgatcatgaactttccgggtccacagatatagtaatccgtcttggcatcatccaggaacaagtcctgatccttcaacttagtcaagtccacccgcccggcatggtcgtagtccacgccctccacctctccctcggaaggatgactcgtgtagaatgtggttcgaatggaggggaattcgtttggaagctcggagatgtgcaacttgaaagcacgcacgcgtgatgaacgtgcgccatgaatgaaatgcagcttgcgcgttgcgggtgatttggaaatcaatgtgttcagcatcgacgtcagtggtgttagacccacaccggcggagatcaacacgattgggttgcctgcttccgactcgacagggggaaggaaaaagtcaccgtagggatgggagacattgagcttgtcgccgatgttgactgtatcgtgtagcagatttgagatgtaacccgggtgagcggcggcacctggagcggctgggtcgaggcccagttctcttttcacactgatgcgatagtagtccggcttcggctggtcgctgagagagtactgtctggcctgcaagtgcttgagagccgggacgtaggtttggatggaaatgtactggccgggctggaaggccggcagtggtttttcatcgacaggggcgagatagaaggatgtgatttcctcggattctttgactttgttcacaatcttgaattctctccagtcagtccagccctcggcgtgttcgtaaagctgcttttcgcggccaatcatgatatctgcgagctgccagtaggctgcaccccatgcgtcgtggatttctggggtcaatgccgcgccgagcacctcgcccatggcttcgaggaggtacttgccaacaatcttgtaatcgtcgggcttgatatacaaggaggcatgcttgttgcagatcaactcaaccgccgagctcagtgcgccgagatcgtcgatatgcgatgcatatgcgtagagtgcaccggccaacgcacgaggttgatgcccattggcctggttggtactgttgaaaacggtgttcagctccgggtgggcttcgatcatgttgcgatagaagacagtcgtgatggtgttgccatgttccacgagaaccggcaccgtcgccttaatgagcgcgatctggtctggagtcattcccggattagaagccattgtgggtggtcgagtaaagaaaacgtttgatcggtgtctgcactgtggcttaattataagtaacagatcagaatatgtgagtaataggaaactaattgcatttggttggttgtcaagctatttatcttcaccgtaatcggattactaacagcaagaaaccgagtttagaaaattcggaaggcgtctggcatgatctgtgaagattttcagagatatctccgcggagagcaccaccgagaggcatatggcaacgcagcaagggataaagtcggtcaatttttgcgacctgcaactttagcttgtacataaaattgtctcgcatgttttatattcctggtacatgcagaaagtcatccactatgtaagctgtatgataggtgatgtgacccacctttagtcctcgtcgatctagatcctaatatttgcgagacgaggtgatgagtcttcgtgctcatgaaaatgaagtcgataatgaatagctctctgttcattgtgacattccttccatcttcctgaaggcagactctgctcttccgtctcaccgcttgccatgatctggcagaacacgtcttgacgaggacattcaattcattcaagatgcccaaatgcgacctctaaacagagagacaaatatctacgtcgatgagggtctttttttctctctgtatacaacttacaccattctgtatgttgagtcgtcatacacgtggtcaggccacacgcgagaatgtcgtcggctccaaacggcccggtttctgccgagccatttaataaacccgattgtccaggtgaccttgagagtcagaagatccgcctggatacttccttaggactatccaacatacatagtgttcaaaaagtctgttcccactgccccacttgctatccccctaacaaccatcgtggttttttttcttcttcctacacaccccccaatgacatttgagctatctgttactcagcgctcagctattatttatacccaccaggccggtgccacccagtcaaagctagcactcgattttaggtactcccgccgaacgatttacaatactttgaaacggttcaaagaacacaatactgttaaatctctcccttgaaccggtcgcccaaggatctttagtgatcgaactcgccatttactttttatactcgcccgccggcaccccttttggtcctataaaacgctgagttgtgctatacctggtcatccatcccgctctactattattaacgttttaaggctaaccggtcttctaaaatataggacaaaaaggaagattctaatcggaaaggaattagctcgacgacgatatcgttttattcaaaaatggcgctctgagtggtctagaaataacgtttaaaactaggtcttctcggatgagtattctatataacgaacaataaactatggaccacaatggtattggcgctttcggtcggaaggctatagaaaagatcttataaatactaaggcatacgttaaagatatttcataaatggtttagggtataatctggttagggagtcgatcagagttgattattatgaggcgggagaatattattaacctggaatcgaagaagataggatatactactatttcctatatagatactctcgaagaaggtctacttctattctatcgaccctgctctatcttttagcaagataacgctcggatccatactgctaaaatcatataggaatggtttgaaactcacgggatatatgtggaggagtagccgccgcactcactggatttaaacccgattgaacctatatggcggtggctaaaggttaaactttttgagttatttcctgagctgatatatataggaaggtctgaggaggattggatagtattcaaaaggtgtataaagatagcatgggatgctattccgcagtcgaagattgattcattgattttaagtatggggcgcagatgtatggcagtacggaaggcaaaggggtattatacaaaatattaaatttaaattttacccgagattggcatagggttcaaccctatttaattcgaagtaaattgagtaaagtatggtagtgctatgcatagatatgtagagatatatatttcaatgttcatgggtgaaaatgcgggtgggaacagacttattaaaccccactgtactacggagtacatgatatgaaatacacggattaggaggcaatgccgttttacccgttctgacactgccatcaaagacttttccctcctttttctgccgtcaacctggaaattttcacaggggagaagatattacccaacgaatgacagaggccacaaacacagactgtgcttgcctctaccatggtagtccttcatcggcgattctaattcgccagctctaacgtgcatagtaaattccgatctgtcaaaccctaaaggcgttcagagatctttcggtcgatctagatctcagacgctagcccaatcagagaagatcgacacctatactccgtacggagtagatagaccattggacaatccattgaaaatgacgtgtgggaagatctagacaccagactcccgcagccgtttgcggaaggcatactactctcgttcaacgttgactccaccaaaccctaaccttattattctctagctggggaaacaggagcctatcccacctcacttgggaaaagggacggaccactgccataaataagctccgtcgcagttgagtcaagcgctaatcgatcatacatggtccagttgcgacgcctccgtattgagtagtgacgtctcgatttacaatggttgtagtgcaaagaaagatggatagtagaagaggctgagattttctcattctgatgagacattagtcaactccgacttcaattagttctcttcattccggctcccttacccttcagaatgttgttcaggaaacgccactcaaccgaagcctcgacgctcaatgggacatccggttccagtgaacagggccagctgcccatgctgcggctcccagacaagctgcggtacaacttgctttgcatgctgggcgagttcgtggggactttcatgtttctcttcttctcttttgcgggtacacaggtgtccaataccccgatgccgccacctggctccccgccgaatacttccaatttgctgtattcagcgctttcttttgggttcgctttgaccgtcaatgtctgggcctttttccgagtcacgggtggtctcttcaacccggcggtatggtcatcaccatccaggaatgagaagatttgtagctgacattcaccaggttactcttgctctctgtctgagtggcggcatgccccctctccggggattgtatgtattccctgcgcaactggtcgccggaattgctgcggcgggcgtggtgagtgccctattcccgggcccgctcaactgcgcgacacgactcggcggtggcgcatccatctcacaaggactcttcattgagatgtttttgacagcgcatcttgtgtttgtcattatcatgttggcggtggtgaagcataagtccacctatctagctccagtaggaattggtctggctttctttgttgcagaactgattggtaagtgacggtcattatcggattactccacaacgtcctatgctgatccttcacactaggtgattactacaccggaggatctctcaaccctgctcgctccctcggaccggatgtaatcaaccgctcatttccggggtaccactggatctattgggtcggtcctctgctcggatcccttcttgcctctgcattctaccgactcctttgtatggtgcgctgggagatgatcaatcctggtcaggattataacgaggaagatgcggccagaaaggagtcgttgattggttcagatagtaccatcaacgccgatgcccctccaacatctagaagagataatgggtttgatgagcatgtctagcgctgctccattgtccgaaagcctgctccatggataactggcgatccatatcaaaccaacgttgggaagtactgaacaaatttttctattatttatatagtagaggccctcgatgttgccaccggattggagtcaataattcaaactggcaatgaggctgatgtataagtgtggatattgaattggaagcagatgcttggcatttttggaatacgagttggaagtggtcggcaaatgcaatcaagctcaagttcgctggtctacacgatgtacatagcagctacaacctaacagacatggtcaacgcaggtgtgtttggatgatttttactctttgggataaaagaagtgtattccccacgtcattttcaccattcccatctttaaattctggtgaaatcatgttatcgtttctgtaactgctttcattttcagctggctgtcctgttcggactctagcatgtctaaatggcagcagccttcctcaatttgcacttcttgagacatttcggacataatttggattcgacacggctagcttgattattccctcaatctctagggaggctgcatcggaggcaatatttcgcacaattcttgaactccgtcagaagtatggaatggacactgatattcactgtccctatcggggcacgttatttgtgatacactatatcggccatggtgtatctgaaacagaacagaagttcgggatatggtatggaccctaataaaacccatccattgtacctatagcattactgatatccactcccagtagaacacgcagtcctgatgcagttataatctcgtggccttccatctatcttaggatgaaggcagatgtcctcgttctcatggataaatcctactccggagactttcttcagccatgtcacagcttgcaaagaatattgtaacgcagtgagaattacgccgagtacctgttcgcaacaggcaacgagatttccgatcaaaacggtcccacttacgatgtaaacaacaattttacgacccgtctgacagaacttttacacgctgagccaccagtatttcgtactgttgtccgacttcacgaagctctctgtacccaagccaatgatccaagtactaagctgcgctatactcctcaatacatgggctgtcgcaaaccaacaaccatcctccattgtctcagtaatcacgggataatagagaacccgacaccacagagacacttttaagaataggaattataatttcttttccggctgcatagcagattttaattgaacaaacacatataaataaatatatatatatatattacttacctacgtttcgggtccttatttccgtgtctgttcttgggaaaacagttcgcggccaggtcggagagtggcagaggtcgctatcagaaatggaccccgagttgaccatcgaaggtgtttttgaccttcaggggtgttctctatgtcttctatcaatgccgttgtcgttatgggatagttttatacacccagcgtataaattcgtgagctacgtggattctcacaacgtcctggcatcgggtcccgttgctgatggcctctcagtgaccacgctaccagagagaccgaaggatcatgcatatgttgactatgtaatgctctctgacacggatgaatgatctggtgacacgatatgccggtgttttatctccatatttcgagggatatccctgctgtgatgaggggaggggtgtttctgtctttttagtctaaaccgtgaaacctgtgcaagattgtattcgtcattggtatcctttattactactgcttactctaacttccttattcgctcttgacctttactctaatcgcatcttaagttatgtctttgttcactctatataacggacaaagtatgctagggagtgggatcaataaaaaatatgttcaattggtaataaaatgctcgccatgagcatattaaaatgaatttgtggaatagccgaggtatttgtacagcctcagaacgccggcattaaatttctgtccccagatgctaggaagaaaatgacgagacaactaggaaaatcgtgaaaaaaggcgtggcggatatcatggctgaaataaaatccagaatcaatggagcgaggtatcaacaatttacagtgcaatcatgacaccaaggacaccggccataccagcagcaacagcgccgacagcagtgggacgagcgaaggccgcattgtcagagacagaggaagagctagacggagacgcggtggaggaagagccggaagaagactcagtagacgaagagccggaagaagaatcagtggaggaggagccggaagaagaatcagcggaggatgagtcggaagatgtggtggacactgcgctggtcagggtagtggactcggtagcggtggccgagccggcggagtcggtaagagtagtctgagcagaaatggcggtggcaacccggctggtgatctcagagccgatggagctagcatcggtagcgacggcagaagcctcactcttgatggatgaggcggcagcggcaccgccggtgctcacggcctcggcgatagaggtcgcctcgcttttgatggatgagatggcagcggcaccgccggtgctcgcggcctcggcgatagaggtggctattgagacgacatcggatccgacggattggccaccgtcgacgacagttgagacgacgcctgtgacatcggagacgatagagttcacgtcaacaccgtctggggaagccatggcagtggtggccaggaagagggcggaggagatcagagtgaacttcatattggagaaagaagaacggattggaagggtgttgtgtgatttaggaacaggatatttagattgtaaattaaaatgataaactggaaatccggggggaaactactgcttcttatatttggtcaatgggcactagtctcctatagatagaaacatcggagattgattgcgcctggatgctaggcagccgaggtggcagtggcgacatgagctcagccttgtgaagaatgattctgatgtcgatcgtagggtccattcagggatagaggggctatgtactcactccgtaccgtgttagagacctgtacagggtatcccaccagacggctttgggcaaattatatcatcccgaggtcctggggtccactttgtaatgaggcgcaagcattggagccgtttcaacgccctagtccctttcagtccctgacccccggaaaccaagagttagacgtgcatgttctatgagcttgattctcatgttctcgcgtgagcatggtttgtcctactcgtgagcaattcaacaacccacactccggaaaattcacatcgcagcaatgtttgggtattttgctgccttagcgatcccaacaactcgattcgcaccggagacaccggcaccgtccccgttggggtggcttggagatcaactgcccacaaagtggtagacaaatggtatgaaagcgcgtcttaccgatacagtgggtcaactcctgctcggcgtccgtcattatgtataattgtgacaatgaatcccactcgcaatttcaaagtatctcgacccctgtggcatttttggctagtcaaagatagccaagggatttcaatgacgcgtcatgtagcaggtttgagcgcctttaatattgcaaaggggcagcgaagaagccaagtgaatctgaatcataactggtcatggacgcagttgccgggggcgatgcgggtcggaatctatccaccggtcggcctgaggcagcacataaactcacgtgccagtgggagagatcaggtcatgtgggcccgcctgagacctcacgttggtcaggcggtcaatgctcacgttgatacccctagtttaggcttatgtaaatgctgtttggtctggaaatgtacggtatctttgattagatcatcccgttttggtatgaaatatgtggtatatttacaagggatacattcttgtatactagttatttactagttgtttactacctaattactgataaataactctacatcgaatatatatatctttggatatgcacgtataactacttacaaaccattgttccaattcgtttactagtagttaccatggcgcattatcaatctacctggtggaaacaccgctatcataagcttgaagagcttataaaggccgagcctattcctgaaccagacgagcctgcagaggcagatgtcgagctttacaatgcatccgatgatcggatcctgcatgagcgcaacgaatacgaggtatgtttttgaagaaatttactagtttcctactggtttgttactaatatttttcaaatagggaacggaagatgaaccaactcccctaacagaagctacccacgacgcaatatctactacagagattgaatatgtacctctccttccagaatatccgcgtactcatccgaaaggctatgcatatgtggttaatctccgacatctctcttcataagagaagaaaaatgcacttaatctagtaagttgttatataatcatcgatattatactagttattaactattttactaggtccagtacgctagtaggcgtgatggcggaaaaagtgatatttactgctccttccttggttgccaagtcacgaagacagcatcttactattccggcatgaagcactgtgttcatcttaacgactatctccgtaacctctcccatacagaggttaatgaagagcttgtagggcgtatgttctctataaagagggatgctcgacagtcataccaatattcgcaaccctaacgtgaagcggtagcgtatgcgacctattttactaatattttattagtagctaacaactatttagtttctacgatgctcttcgacagaaatttttggagagaaaagcttgtaaaaaagcagacgctacctgcgaaatggtctacggaaaattcaaccaccaggtaagtaaattcgttcttattctttttactatatctttactaatatatagcctctaataactagaatgtagtaggagaggaattgccattcgttcgttgttctaacggctcagctagtaaccacacgaatcattactttacaacattatatacaaagcggaacaggctagatatagggcttctgattagtcttcttcaaaaggaacagagggaagttaccacagaagtatacactgcaatctaccaaactagctcacgagcccaattttgcggtatgaattcatattactagtatattattattgactaactagttttatagatgttgtgcacctaggcggacgcggtgcgatccagagacaattcccacaatgcacagttaaattccgtacatttgtgccaaaggatatagagaagcatccatatgctatcttttactctgcagggatacataaccacccgcccccgccaccgagtaagccaccatacgaccttatagaagagctttggaatctcttatctcggggacaaacatcggatcttacacttagtaagtaaccttactagtattataatactattttattagatactaattagtatctataggcgcgtttcttcggagtgatggggttcgagacctcgccgccagatacggcgctcaaaccctgtctgaactataccagagctttgcaaataaagagcgattttctgtggtccttacaaaaaggagagcaattgactatccaatgggtagacatttagtaggtgtttacttcgagatggagaaaaatccggctataaaggtgcgttttactagtatattattactactatgctaattatcctttagctctatgtacgcgagattgtgtataatgaaaaaggtgcctttatattttgtgcccttaatgaacagctcgagatccttgcttcattacattcattcgaagttgatatgtcatataagcgagtgaaaggcgtttttaacgaggttatcttcgcaacatttgtcccaaagcatggaaaaagtttgttttactactattatatcagtatccaaagctaatatcttctagttatgacgctattccgagttttcacagatcaggagactacaaaagcgtatcattttatatttggaaatgtctttaatctcgtcgagcgctgtataggtaagaagatcaagttccactatctacatggtagtggaataaggtctattatcactgatatgtgcccaaaacaaatgacaggtaagtattataccttttactactattattacagtaacttactagtattagggcttggaaaaatgctccaggagactgaccagaaaaccaataaccgggatcttggttggagatggcatactatgaatgttcttatcttctgtaagatacacttcatacgtacaattaacaaattggtgccagcaagccgggacccagaagatctctcacatatagagggaagaagtcgactagccagcttaatggactgtaaaagtcgacagaattattaggagttggctgaccttattatcggtatatatttccatttgaaaaaactagtattttactaatatttatagcgcataaccctgagcttaagggttgggctgagcataagaagatcgatgttattgcagctgggctttgtaatgcatgctcgccaatagactctatgttcttcgaggaagcgcgaaagcatacaaatgcagtagagcaaagccactataaatcctatcatatgggtacacaggatacgctccttggtacagtcacgaagtgagtgaatattaattatttactggtattctaccatttacttacattcatttaggtcaaagatcctcgacgaaaccgacgtacagcaataccatagccgtgaagctttcgatatcagacattcctatcatacagatgatatgcagacacggtttagtaagagtatacagcgagagggtatgtatatttactacttatttactggcatctaactaataataattagaatctctgcgacggaaacgttaccaagtcctagatgatgatgtggcccctgaggataaagagctttatgagtttaactcttcaggcaatcattcaattcctcgggcaggatccaaaaaggctaaacgcggccgtggagcaagcagctcacaaggtcgttcaacaagtcgtgcaatgtatgtactctttactagtatgatactaattactgactattgatagcacacccgctgtatctaatcttcggcatactacgtcagtcaacactggcaataacagccaggatgagaatagcattgagagtttagaagatcagaggaaaaaggttaaaaaattgagggaggatcttaaacaacaagagagacagttagtactacgggaaagggaaaatactctctagagatagggttgcgatagggttacttcatatacaataatgtttaatatcttcaatttaccagttttatactacttttcactatagggttatggcaaacgccatgttttttttattttttatacagagaaacactagtaaaaagcaggataagcataataacaacctttcgcaggaactccaccaatagcagccaaagtaggaaaatactagttcttcaccagtaaagaaaggaaggctagtagtatcactcttccatttcctctccctcttccatttcgtctccctcttcgttatcctgttcctcatcctcctctacagcactagttacaaacagctcaaaattatcacaccggtcagcattagcttcacggcaacaacctaatactagttaataagtagtaaaaagatacatttcttgataatatcttaccttgacgatcatttgcatccttacacggctcacaaggaacctgaccaccaagctccttagataccttacgcatattggtaaggtgaagctattccaatattagtatataatcaaaactagtaaattagaagtaactcacagtgccatctgccttacgaggaagctcaggcttcacttgtactatagcagcaacattcgcgtcatactcatcccggatcgcaatgtagaactctattagaggtcagaatactagtaaaaaagtagtagaagaataccataccaacggcatcatgctcatcctgtaaagttggacgaccacccgaactcgccaatttcatatcagtatgcttgtctgcataatgcttcctgagattgttggtagacgtagcaggagtctgtaaggtaaattagtattagttttttactagtactttaacaaagaaatgaaggaaatgtcaaagaaaacccacatctttcgggcagttggcataacgacaaaagcgctcgccgaggaatagatcgatttccccctgtgtctattctctattagttttattcattttattagtagataaatagtatgctcacattgggatcgtttagttgagggagatctataccctccctcgatttcagggtgcagtaccatcggtatgcagtctgaatgcgaataactgttagtttcatcttcaatctctggcccgcctgagacctcacgttggtcaggcggtcaatgctcacgttgatacccctagtttaggcttatagaaatgctgtttggtctggaaatgtacggtatctttgattagatcattccgttttggtatgaaatatgtggtatattttgtacatatactagttacgatcgtttagttgagggagatctataccctccttcgattttagggtgtagtactatttgtatacagtctaaatgtgaacaactgttagtttcatcttcaatgtatcgtattttcatcttttctaggaccttttcatattatcttatagggttatacttatatacatcgcgtacttcactatggtagcggtagttatatgacaagtgatgttggtggttatataactaataaaaaagtagtatggtactggtaagagagaagtgggtaagttagttaagggaagtggtaaggtactgaaacccttaaggcacacaagaactcttggctggtagcctcaggctgctaaccctactgaactctcaggcgggcccacatgacctgtggtcactgccagtggcgatccgctaaaaaaagaaacaggggaaatgccatggatggaacatgctggaaattggaatagagaagcaatgactttcattaattattatctgtggtttaaattactaacaaaatgcatatgtccagtgatgatgatgcaatgagacgatgtcacgctgtaaactggccgtacacctggatgatggcttcccacccgccttggtggtctgattgacggggattgctctttccatcgagcaccattacatccgtcttgcgcgtgctgatcgagtaccaaaccaaattctgagggtcattcgtcacccgcatcatgttggtttggcagttcccctcgcaaggcatgttgtacagaccattccagtacccgtcgaaaaacgcccaggcagctgagttgtacagcgcgatgttggatccgccgtcgacgttcgtagctatcgcggtacgacacttttgatcatctgcagcacaccacgagaaatcagggtcaccgtatttggcgacagctgtccatggcgctggtgcggcctggtactcgccttggccttgcatatacggtgtttctgtttgaagaagacccgcaaagacgttctgggctttgtggaagttgtagttatacagccagtgatgctcggaaccggttccagtcagccaggtgcccttggtggattcgaccaagattccgcggcctgttgagataatagtgagagctgactcgctatcaaggttgtgatcggcggtccatccccagaagttctcaatatatgcggacgaactgttggtcaggtgcattaccataaacgcagccatacagtccttggggttttgcgacgtgcaagcactggagatacttgtgtcagcggtcccgcccaccgtcaccatcgtgttccaaagaccgatatcgccgggctgagcacctgcggcattgatttcaatgatcttggcccctggcaggatttcgccaacggagaatctcatgtcctgaatctcaatcacaccgacgtcgccaggattgccaagttgaacgacaggtctcggattgccggaatccttgaacttctccccatatccagaaataacagaccatgcttctccaacaatgcgagttccgactgggacgaagatagtgtctgagactcgatatacaccaaaggggatgtatgtcaccttgcacgaatcggcattttcagccaagatagcgttcaggcctttggtgtcgtcagtcttaccgtcacctttcactgtgtgtccagatacggtcttcacatttacaatatccgctgtgctgtaatcttgataggtgggctgggccttcgtaaagtatttgtctccaaccagcaaagcggccggccgctttgtttcccagctcaccccagtctggtaggtttctggaacaacagtgccccagacccatgtgtcgacatgagcattagcggccaatgccactttgccctgagcgtcgaccgcgatagcgttcgaagtatcgtgcttgaggttctgaatgagaaactgactattttggtttcctgaatcatgggacgagtcatagaatctgactactggtcccgtgttcgtggaagtggaatctagaagcactaggctacccagtccatttccagtcatatcgataccagtgccgcagctatcaaaagttgcttgttggagcaacaccgtccacccacctgccgcggagaatgctgttttgcaagattggaaatagatgttcttgaagttgacctgttggttggagttcttgatcccgatagctccgccaataatatcctacgctttgttaggctgctttttcttcttcttgggcttctctgaattacttaccacatccgtgacggcaattgttgacccggcattgatatcaatcccagtgtgacccgtggaatcttttggcatgcgaatcttgacatttgtcaaccccgacccttgggcaactccccactgaagagcagtgaagtggcggtccgggctgagggctgtcgtatcaacgatcacattcttgacaagcgttgcaaagctggtttctgggttgccattgtttgaatcgtaccccatgatgagatagtcaccacggaaacctggtgcagctttgatgatgggtgggttcaacggattgccaacaattatcgtaccaacagtcaggttgagagtggtttcaagctggtacacgccgcctggaaggtagacctgggcaggataccgcgtgacaccttgacccttgcgactgccgcccgccccatcatcgtctatagccttctgtaacttcggagtttggttaccgctgccatcattgacgaccgagtagtccatcacattgcgatacaccgggtagagcgacgttttggcgtagggagcaaatcctgctccttgctgattgtggtcctgctcgtccagccagtaggtctccggtgatttggtggtaggggcagcacatgtttttgtcgcgggcgaatgatctacttgagatattggactggacaggttgtcagcaatcaagtatcctatgagacgttaaatgacacatacgatggggttgaagcactggctgctgtcgtagtagcctgtgccatattcgaggaggagccagccacctttgtggccatcaaggtatcgtcagccttggatggagattgcacggtcgtggaaagagtatttgctataacagacgaagccttggtacatgcgcagtcatgaacaataacagtggatgatgtcccggtcagacctgccaaagaagatgcaagcgcccaatcaaaagggtagtcattatttgacggccttgcatgaacggttggagatgaaagtgcgtgcgatgaagacgcatgcaccaagtctagaggcacaatggcacctgatgttgtagacacaaccgctgcaattgcaaccaaagaagagaagcccctcatattcgatcgaccacaaaccacaacctcaatctcgaattagacagaaaagagaaaccaaaaagggaatgaatggatactaataaaaccatcgcaggtcatatgtcaggttttcttgcaattagcatgccaggtgatcttggaatgcacacgatcaccttgtatgaagaatgtatgtataggctttgttggtacatcttggctgaaagggccatgggtgatcgacgccccttgcaagactcgggattcgcaaccttcaggcatactatcgctataactccccttgtatcgccgaatttgttgatttcgtggaattctaggcttacattataatatgctgcatggtctccatcctacaaaacagtattaaatagcttcaattggatttacaacattgtgtagctcgaaccgttaaaggatctcatgaatatataccaaactgtacactatccagatcagacaaagtgatgttctaggttgtatcttgactcctaccatcgttaatgcctagctaacactcacaattggcgtcaatgtgatattggaaaataataatcagatgtgttatatgatgtgtttctaatgctctagactcgtgccacgtggtaaccggtggaacgtcggcacaatcaaggttcctcacgacaccccttgcattgggtcgaaggtccccaggtagtattgatataaacttccatgccaatggtagctatgcagcatgaagtatgcctccttctgattgcctgccgatcttatttgttagacttcatctccatgagtattacctcggcaggttctatacaaaattatacatgagtcatattcatgaggccgtcaaactatgacttacaataattccagctttggtatgtctcttacttggaatcttgcgctttctgcaaattgtaactataaatggagcttaaagttgcgtatctacaacatcccatactgcaatcgtcggagacagggaattgccaatggaacaaaatgttagaatctgttctctagggctgctaatttatctttctaaagcaactgcataatgatatttaggatatgtgaggtggcgagaacctacaaggccgagatttgcgtgggatagatttccgacgaggcgacacccgcaaacaataccctatgactggcgggaaaagggcttagagtcccgttgagttgatgatttcttcctttgaactgcatgaaaatgaattccctgttgattgccaaccgtggttcacacgtctaccccaataacgtctctgtgagctcatctagcgattatgatagcccaatttggcacgaagatcctgaaagcattagacgaaagaccttgtatgattcaaaagcttcatcgaaaagaggttcacaaactacaaactcattcgtccccgaacgatcggagactagatgttggcgaaggagtgaaaaccacgcgttgccttcatgtcggacgcatccatcagcagcttcaatgatgactcggacccagacaatacaacctcgtccgaagtttggcaggatgcgccccaaaccagtccacaagagaaagagtcatcaccccatattcgatttcgatcaaatgcgggtttcatacaggaggccaagcatgacgaaccgccaaaagtttttcgcgaagaatgggatttggctcaccatgaagggctgcctcatcggccgacaatgccatactcccatgagtctgaggatattgccgatacaccacagcgagatcgtgagccacagtcgagtgagacggacagcgagtcaggtgtccaaaggatagaccagaacaagcgaccgggaggtgagaagaaggaagacgagaagaaggaacatgagacttctgaacagcaatccacactggagaaatggcgaactgcgaccaggaatttcagacggaaagcatcagagttcggtgaccgtctgggtcgcccacaggccgagggagacgacttaacatccgggagatatcacgcggactgggcgaccggtggtgcacctccactctctgatgtgacagatgacaagcacaaaagtgtggaggcgaagcagcgcgaccagaaagggactagctcggaagcccatcgtctagtgcgagatctgacgcaagaccattcccaaaaacgccgcaaaggccgtgggaaaccttatcctcaccccgacaacgaatttaaagacgaagagaatgagacaggagcagatgcgagcttgagatatcgctctggcggcggcgggatcctgtcgcagttgatcaaactgcagggtggtcagcaacaaggtgctggaggccagtctcgaacatcaactgactcatctagcagcgcagaatcggcccccagcggggccccaacaccaaaacctaagaagcaaaagccagtgaaatggtacaaaaagcccaagaatacgtcgaactcgaccttgattggtgggggcgcagatagtttcagtggtgcaagcactcctgtttcaagcgaaatcctatcgcaagcctcgaggcgccgtgacaaggagggtggcggtggcggcggtggtggaaatcgcaatatgcggcttgaggatgagattcgagtgacagtgcacattgcagaaattatctgtcggcagcggtatatcatgcagctctgcaaagcattgatgttatttggtgctcccacacacaggcttgaagagtacatgcagatgaccgcaaaggtattggaggttgatagccaatacctgtatctgccaggctgcatgataatgtcgttcgacgatccatctacccgcacgacagaggtgaagatggttcgagtagcccagggagttgatttagctcgcctatcggacacacatctcatctacaagaatgtgatccacgatgtgatcggcattgaagaagcaattcaggaactcgatgcggtcatcaagaaaaagcccatatatcacaagttcatcgtcatcttggtgtacgggttggccactgcaacagtcgggcctttcgcttttagtgccaggccgattgacatgccgatcatttttctcaatggtatacttgtcggtttaatgcaacacgtcgccgcgcctcgttccgtgttgtattcaaatgtctttgaagtgacatcgacagtggtgacgtccttcctcgcccgcgctttcggtagtatctcccttggagtcgtgaatggcaagccacaatacctcttttgcttttccgccatcgcgcaatcatcgattgcattgatattgccaggattccttgttctttgtagtagcttggaacttcaatcccatcagatcatcgctggctcgattcggatggtctatgctctcctcttctcgttgtttattggatatggaattaccgttggcacaaccatctacggtctgatggacaaccacgcggtctccgacacctcctgcccagacaagggagcctttaagaatccatatgttcaacgtttccctttcgttgcaatccagacagtctggcttttgatcatcaaccaaggaaaatggaaacagcttccacctatgatcatcatcgcaatggcgggctacattagcaactacttcagcacgaagagactgggatcaaactcccaggtagcgaatacagtcggcgcgtttgtcatcggcatcatgggaaatctgtacagtcggctctggcatggccatgccgcgaccgctattctgcctggaattttcattctggttccatctggacttgctgcgacgggatctctgatctcgggtgtacagtccgcggatgaaattcgtcaaagcgtcgggtctcatggtagcagtagttcagcgcccggcgctggcttgcaatccaattctatattcagtctagggtttggcatgatccaggtggctattggcattacgattggtttgttcatttccgcactggtggtttatccatacggcaaggcccggagcggactatttagtttctaggctttttgtcacgccgttgacagttggtttctgatgttgatgttgatattgggataatgtgcataacaaaaagaagaaataaggaacatattctacgatgatgagtactgtaattcggcccatgtgaccaagcgcctatttagggaaagtagcatgatgccctaggaaacttcaactgtcccatggattgtactaatgctacatacatccgtatatgtatgattgaagtcagcgcactctcaaaccagccgtcacaactcagaaacatacaaaattttctacgatgctattcttctcactcaagaggggattcggaaaaaggagcgagttcttcagacacccccgaagtccccgcgagattagcagattcacagtttggtcactattttggacccccttcatcctgggtaatatctggactgcgaaagtaatagagcaggagagcaataccgacattctcattcggcgagagtaaatctattataatacccttacggaaatacggcgtgctttctaatgctcagatacctcccatactcgagcgatatcctgattattcttcaaattgccggccggtcgctattcccgaatgcctatatgagtcattatcgacgaagaaagctcaggttaagagcataagacagagaggggcagatgggatagaagaaggggactatgctacgtgggcgtgttcggttgcgcagaaatgtgatgagaaatggaagggagaagtccagaagagggaagagagggatatatctagttgggggtttatagcgctttaagtttcttcccaggtagatagctatcgtgggaatgaattgaaccagccaaggcacctttcccgttgtcttttgtgagtgaacgaaagcatgatatgaatatgaaggttatcaaagtgaatctccaatgtattaggaacaaaatacctactgtatgctaaagaatcaagtctagcatttctaggagaatagtgaacgaaatccgacaacgcaatgcaaatatgaaataacataagaattaaccggcgaccagtcgccagccagctcgctttaataccataggccctaaggtgggtcggggagcggcgatagaatcatgtttcgaagatattaagcgtgctctattctgtcatcttgcgtggttgttatgacctttttgtgatcttgagagatagcatgacccagaagttcgagcaggtgtcgttcgcgatatgtgaagacacgaacaccggttgtttgtaggaatcgctttgcatgctccaggatgagctctagatggatgggaggaaggcgaaagagggtgtcgagggagacagtgatttggtccggagaggtgttgagagatggaaatgaggcaagaagatggtgggtggtcttgtcgcgggcgagggactcgcagtatttttcaagcatattttcccggacaatgaagtgaagaatcgagtccaaggagccgggatggataatagcctgcggtagggaatgttcaaggtcggcgagagcgcgctgcattacaatcacatattgcagatcttcaatgagcggtagctctgttggtgatgtatgaccaaagagtgggcgatcatagccgagctgctttcgccagaaatagttgcataggattaaagaaataatacacgggatcaggacaacgtatccccaccaacgctcggcagtgaccattgaagcggcaccagcaacaagaccattcaacccattgacaatggcatgccattggaatccacggaaccgggtatgtagacggcgacgtatatcatcactcggctcgcgggcaaaaacagcagcgttgtacacatggaatcgatggaagagatagccagaccagatggcattgaaaaggccaaacactgcagcgagaccattcccaatatatccagacagcagattactagctttgaagacatgggggttggcgccgccaatcgccatcaaagtgccaacaccgaccaacaacgagccgaaccccatcaacacatccatcacgatccggtcaatcacttcggtgccaatttcacggactccaaccccaagccggctgtcaatgagccgggctagttctgcgttcttgcagtggtatttccgcaaacgttgtaggtgagcccgctccgctcgcagcagcttgacattgatccagctcagccgaaaatcatgaatagcaaccaacaccattcccaatgctagtgtaccaccaattcccatgagcacagcggcaaacttcggaacgggggtctgattccagacgttggcagcgaagtcaccggcgttggctagctcaaggtacccgacactggcgagcaagctgtttttgaattgctgctggtgcagtagacggaatcgaccacgtcgccggactagcacaacctgggtttttttggattccagggattcctgccatgtgatgtcactggcttcacggatgagtttcgggaccacgggtggtggggactcggccgttgatagtaagtccatttccgtggccatcgtcgtgggcttggaaattgactgtgcgaggtgaacgggagatggaggggtgaataaggtgtcagaggaggtggtaggggtcaccattgtaaaagtcgtatgcgggtgaccgtaggaaggagaagctcacacggggccatccatgccgatgctctgtacaaccgagtttagagggttgaatgaagattaaattgacagcaaggagggggagaaagacaggaggagatacaaagggacaaggagacaaagtttcgaagaagaaaagacacgcaagcacgtaagaccagggaatcatccggggtcttgagagttcacgggtggagcaagacacccgccttggcgtagccctatagggctgaacatatacttcggtttgcaggggatcattgtccgtgaacgtctacggtataatattgtacaaaaaaacctagctagtaaataaattgagtggaaatgagccacaggcatgatccctcaactcccaatacttacattactgggtgatacagcccaaccaatccaaggacctggcgatctttacatagaaaatcctaggcagcgacctaatgtaaactgtaaatatggtctaaaaatacataggggcgagataatctatgcctctttcgaagatttaacatcccctgagtggggtgtgcttaatgcacgtattagcttgactcctgcgtctgccatatccccggaatgagcgctccagaactgggcctcacggtcggatccacgaagcacatcattccagggctcttctttggtcggagagggagtgccatcgattgacggctctatttcattcgagctgtatacattgactcgttcgttgaaacgcacccgatgacgagtgcgaccgttcggcgagccctgggagccggaactgagggaggagttcctcgccagactagcagcaagataatccttgcgcactgcataccgtatagcctcttctcttcggatcgaatccgagaaaatcttctcaagggctgtagaagcagtgaatcgcatccccagatagacctgctcggcgacgaacaaagtcaacagaagcgaggagagccggacctcggaaataggaccccgatagacatgcacaattgccgctgtagatagagtccccagccaggccaagaaatctagccccaatagacatgggccgatcgaatccgaccggatgggtggtggtcgttggcactccagcgtgagcttgaagaagtcaccccgcagctccaaccaattattcaacaggaagccgagcggaaccagtggccaggcaactccaaataatgcgagatagccaaactgtacacacatctccatgatgtcctcctccacatggtattcctctgcgccggcctcgctacgcagtcttttcataaatgctgcttcgtctggagagtcaaccaagaacgagctagttgttgcggaatgcttccgtttgcggctgtactcggcctttccatcccgatagttttgccacttctgattcaggacatgcttcacatatggcaggacaacttcctcgccgaagctaagtacctgagccgtcatggaaagatatatcacctcctgctggaatcggcttgtatcgacctcgaatttcttgtgcccgctggccatatcggccgtgagccccgttcttcggaggatgtcgaagtatggaacaatttgtttgccgaagggaacatagacataggcggtcaatatcgtggggaggaaggaagtgataaaattcatgacgaaattcttctgagtcagggcaagatcgtattgatcctgcgttcggtagttctcgtacttagtcaagcgggttgcgatgcttgtgagaaacgaggtgatggcgggcaaggatagcgaaaacaggacggtcggtacgaattccagatactctttgaatggaccgtcgtatacctcggatatgaacacctccgatgcgaaggaggcaacgatcaatgctccgagggccacgcttgcaaccgaagcaaaaggaaccaaaagcagctggcgtaggaactgcttccaacctgggaagacatatttcacttgaccactgattgggtccttgacctctttctcccagacgtactgcttgcgatttaccttgagtcgcccaacacctttgacatcccatctctgactcaaatcggcctctcgaatcttccagtactcgacgaatacaacgcaccaggcacaaagtacagttccatacacaatggagtatggacctagatacagccacccaagaatgcccaatcctgcgggcaccacgaggaataacgaatagcaatggataaaagcgtagtagaaagcgacctgcacaaggttagctgtttgtcattaaaccgagccaaaacagtcacggataccttttcaccaaacaatgctcgaatcgcatccagatcgctagtcgtcaatacagtttttcgattccattgacgaagcatttgcgcgcaggcctcctgatcgtgtaagggaaacgaggcggtgatgttcttccattttccaaaacccggcgtgatgcctgcgcctcctattttcttttgccaggtgacggcatggtataccgaacgaatctcttcggctggtgtatcggcgtcggcgatagctgtctcgtcgccgtccggtaaggtatgagtaattccaaacagccaatccttgattctgtgaagtgttaattgccccaaaattcaatcgtatgacattcaagacccccaaaccccacttaccttgactggtgtactaaattcccgagatgatcccgcggaacccgaatgcagactaatagcgcttccccgtggccgtgacgaacctgaacccgaaggccagcctcgcccaaatcgtggatcagcgtccgaaactctgtaatagcttgggcttgatctgaggatcattagtatatatgcaaacggccaaggggatcccacgcgatttaccgacgtcgccaaattcatattgtaatacccaatccacgcccaggttatcgttatcatcttcgtcattgctataggccgcgagccaggacatgttggctaggtgtggcctattgagaagagcaattggagggtaacaggtggtcagagtggttcaagtggtcaaacacgtcacatcaaaagttgaaagggaaaatgtggggagattgcccttcaaggttgtcaccattacattattactctagttagttatgtatttttctatttccttctattttggttccacccgggtatacggtatatcattgctgaccacacagccctaccatttcaactcaactgctacctgaacccccgaaggactacaatatccagttgagattcctgaattgcacaattgccttccccagttcccatccgactcctacatacagtcgttatgctaccggaaatacgagtcagccccacaagtcaagcttcagccctatgagggagatttcatttgcatgaggatccagtttgccatccaatgataagcaacttacgatcaccatttctcaccatttctctgccatgcccccttacatgttcaggggaatcgcaattgccttttaagccaaaggaaatactcgaatgagttaatccggcactatataggcgacttaaaggactcccctgttcccaagggatgcgctgtggggtccactgcgggcacgtgcagttgtcggattggcgggaattggctagggctgaacaggagagagagagcttctggttcattaacgccctaagaaagcccccgtgaaagggccagttctctggtccagaaccaattcccggggtatctcctctcaggattggcagactgttgggtgaaatgctgttgcctacaaaactccatgccaagccactaattcgtgatttgcgacgattccaaggaaaacccacatttcattggagatccgctatttgcggtgaaagttccccaacgtatctgaacaatattggtgccaagagtggaggcgggaaaacttgaatccatgacggcgatggcgcaggcatcaacaatccgcaggtacgggctattacggagtacatacagctttctgctgaaagaggtgctctcagccacaatgttggggatagtacccatccggcgcttcccatcgtggctataagtacatggggtaacatgcacgaccgagcgccatgagatcatttcccacgaaaaaaaccttttctttcctggcgattattcacgttattcacgtccctagcggcttaccgtatgtactcgattctcgagatcatggcccgtcggtttcctcgtgggcagaatcttaccctcgggttgagtgtcttcctctttatcttcatgtttctgcctacctttgttattctgctagccgtcatcgtattctttgggctggtgtatccgcgattacgcaagtcgtacagccttgaccccgaaggagagctggagtctcggcagtcggaaaccaaagattgaatgatcggagcatggtatgaatatatgcaatgtgctcggttatgttcaatcactaacgtgtgtaaagataccatctgggtgtaatactattaaaccctgctaccgagtccacgaaaatgcattgacgcttcttttttttttttgtcggattgtgcaccaagcacaggatttcgagggcgttttgggtgtatcttattgagttcaagaatctgaatgtttcatgttatttcaactaaatgaagatctctagtcataagatcttgaatagagaaacatattatttcttgcaatcctgctgtatattaggtaaaagataaacctgaaacaaatgcctagcaagtctagaacgaaaatcacaatgtcttacatatatgtacagtcatgtaactaaacattaactagtacaccattcgtaccatgactctaacgggtagggctgacacggtacatggttgaagggctccttcctctttccccgttcctcccgaggtctctccgttcctctttccccgggtcatctccttcatgaatacactggatcaaaatccccatccaatcccatctccttgagagtcctcttcgagaacatataatgggctgaacagattcattatcttcatccatggaagctggatctttccagaaaacagagcagcaccccctaaataacaccccgctcaatatctgatggcatcagcccaaccgctcagggtattcatcatctcacccgcctctattctgactcaggatgcacaacaaacaagaaaagcagctggaaatcgaccagccactgcctgatcggtttagcttcttttcgtcaaaaacccgacaagcgaccgcctcgtcgacatgggatggtcttttccccaacgaaaacattgaccatatcttccaggagaagcttaaaagtcgcccagatcccaaccagccaatctggtggattgacatatgcgacgccaccgaacaagatgtcaatgccatctcacaagctttgtctatccatcccctgacggcagaggatattgctattcgtgagccccgggagaaagtcgacgtccacaagaactactacctgatctcgtttcagaccctcgtggtaaacaaggtcaatgagcgaccgggaattcccgtctcggctgcattatacattcttgtcttccaatatggcgtggtcaccttctcgcctagtggttgtgggcatgtggctcgggcgcgagagcggattcgcaaaatgcatgatcccactattctgacgagtaactgggtttgctatgcaatgatgtgtgttcaaccattttcccgctcagcaacccccttttcaatggatgcacggctaattgatcttcagagacgatatcattgacagctttgggccatttgtccgggaggtggagcgcgagtccgaagcaatcgaggatcaggtgtttatcagtcgcatcgatgacgctcaggctcttgttccgcagattgactccctccggaagaaaatcactcacataatccgctgcctcagcggcaaggtcgacgtgttgaacggattcgtgaagcgctgccaatcccccgataagaaccctgttttccctgaccgtgatctacttctatatctcggcgatgtccaggaccatctaatcacgacgttgtcgacacttgggcacatcgatgagatcatcggtcggtcccaggcgaattatttagcccagatgagcgctacaaatctccggttgagtctgactattaactctggtttgagtaaggtcactcttctggctacgatcttcgtgccgtgccacctggtcacgggcttgtggggaatgaacgttcctgtcccgggacagcatgctagtgggctagggtggttttttggtatcctcggttcttttgcggcattcatggtcatttgcatcgccgcggctacgaagtacaaacttttgtagacgttgaccgatggatacatttggcttaggatattttagtgctaagagacaatgtattgaatatttttgctcattccttctctaattctaggcctcgtttttcaaaataaatcaatggaagttattcacaggtattgcaaagctttcgtagcccgaatggcgacatatcgatgctgatcaacaccgatattcaacggtcggagccacggcattgacttagtcccaccatcgttgatcatcaattcaatgccatagattcaacagtgggcacttccggcttctgcgccgggtgtgccgtcagctacacacttctgagcaggcatttcttcctagtattttgtggcgctgcttggaggctgtgtggtggagtcggaatcggtcgtcggcccaagttcgtagctgaaccagagttcggtggtcttgatggtcttgtatatacagcatcaacaaattctagacaggcgaagggggagaagaagagttcgctacgccggtcaagatctcggctgatagggcaggcgctctcttcaaacaggaaagatcagcatgaactttgttatacacaccatcaactgtcattattaccctctgcattccgtactcgatagctgcttttcttttggcttgcctattggtctcttcggtatcttgcatattccgtgtacatcattcgtgcataatgtactccgtactgatccgaggatacctgatagggtcttacctctgggtacgtgcagggccgacgattgcgtaatgtggcaggcgagttagtttgttagttatcggtgtcaaccagtgagtcagattcgaaaaacaccagtgggtccgacgatggcagattgtggcaatagctagtgacacagccacaacagcaagtacctgtggggcggaaactccacaaaccaacgagaggcgcagcagaccaacagctgtacatccatgtatcgagagatacggagtatgtgttgtactccgtaggacagtcggacatgggtggagccgttctgaaaatacttaatgactagtggtcaatgaagcacgacagcgcatacatccaacgcacattgtacattgatgtactccgtgctccgtagagtgtacagaaagcgccctaaggtgtgacgagcacccgaggagaataagcgaaaacaagacctcagtaccaataataagagcacccaaatacggggcttgatggtcgatcccgacaataattcaccaatgatgttgagattcgtggatagcgcgtcattgctggattaaattggtccaattggtccaatacagagtaacccctgcagcattcaggattgacatcatgctagggatagtatagtatagggtgacgaaagacaacgcgaggctaggaatgtttgcataggttaacggttgtcaaacattccttgaaagagtaatcaggatctgcagggctgagataaaaggacggaaaaaggtgtggcgttggagaatcatcacgccaagctgccaaggccataagtctggccccttgagaagtcaactgtcgacttcactcttcgctctttcctattttcacctactcctactatcttatcatcatcaaaggcttgttgccttctttcatctaactttttttctctgaaatacatgcgtaagtagtttcccagaggaggctcaaagctatagctgtagctatagctaccccgagatcttgtctccactcctatgtatctggctaacgatgttcccttttgcagaccggattcactcgtgggcgaaagctcacgcgtcttcaagcggcctgccagaccagtctccctccgaacaggccgccgaccctgttaattccgaaaaaccttctcaacatggacaagtgaatgtacctgtggaggaccccactccggggtccgtcacggaaaccaacaccaaaccgggtcttttgatccgtatgcgaaacgggtccggccgtttctatcaccatactgcggatgctatctgccacagctggattaatgtcttgctgatatttgtaccggtcggcattgcctgtgaggccgcgggtctcaacccagccctcatcttcgcggtgaatgcagtagccatcattcccctggctggactgctcagtcatgccacggagagtgtcgccagccgacttggtgacaccatcggagctctgatcaatgtcacttttggaaatgcagtcgagttgatcatcttcatcatcgctttggtcaagaatgagattcgcatcgttcaagcttctcttctcggctcgattctcgctaacctgctcttaatcatgggcatggcttttctcgctggtggccttcgcttccgagaacagatttacaacagtactgtcactcagatgagtgcttgtctgctcagtttgagtgtggtcagtctcctgctgcccactgctttccacgcctcatggtcggatagcaataatgccgatcgcgagacactcaaagtcagccgtggtaccagtgtcgttctgctgttggtgtatattctctacatcattttccaactcagaacacactcgtatctctacgccagtatccctcaggccattattgacgaggaatccaaacctggtgttttggcagaatttatgaacagctcttcggattcgtcatctagctccagtgatgagtcggatgacactacaacttcctggaccaccgccaaacggatcaaaagagcaatgaagtaccgcagacaccgaaagtcaagtacaagctcgaaagggacaatctctcataattccttccagaagagggctatggcatcgacttccaatgagaatcacggttccatctccaattcaattggtagcaatgaacacgccattgagctcagtgatgagattcgttacgatgccgacgacgacatcctgccctcttcggcagtccgttctcgcgactttggtttggctctgagccgcatggacagcaaagcgagtaagaagtcgaagaaacgagatcacaagaggcgcgagacccagaaagcagagaagaaggctcagatcgaggcctccgaacacagcggtccctccgatcaacgtccggtcctcaagggattcccatccgcccctaacgttgttggcttggaaagcgtggatgatccccggaaacgccggtctcctttcggacctattccgtctctgctttccaacactgttttcagctcccagtcacccgcgggctcaccccgtatgggggccacttcctcgcggccaggaatttgtcgcagcaactcgctccccgcacataccagtcgtcctccgctggccggaaacgcagtacagttcgcccgtggcgcttctcgtctaaccgagcataatgatatcgtgggtccggagatagcttctcaggccccggaacccacaatgtcacgtaccgctgctgttgtcatgctcctgctgtccactgctttggtggccgtttgtgctgagttcttggttgacgctattcccgatatgatcgctagctcaaacgtcagcgaagctttcattggtctcattatcctgcccattgtcggcaatgcagctgaacatgttactgccgtcagtgttgcgactaagaataagatggacctgtcaattggtgtatctgtcggtagtagtattcaaattggtaagattccatccgttttgatgatgtttctacgtgtgcacattctgactatgccaacagctattttcgtcacacccctggtcgtcatcctgggctggtgtatggacaaggacatgtctctgtacttcacgcttttcgagacaatttgtctctttgtaaccaccttcgttgtcaatttccttgtactggacggccgaagcaactacttagagggtgtcctcttgattgcagcctatattatcattgcgtgagtttatccctgtcctcggtctcgcttcaatgtgctaaacatttcttcagcctatctgcgttcttctacccgcctagtacgaaatcaagtgttatcgcaggctgatgagcatatttatgaacccgcgctgatgggatctcgagcgtgggttggttgcgccgtcaaaggtctgtccgctgattgatcgcctttgatcgccagcgctagagcgccattgataaatacacgcctttaattccactctttcctcgaacgatatgttattactggtatgcaagtcggtagtagtgcacgtagtgtgagcaggaataatataatcgatgtatatccccaagatctcgtattgctggctgggaatcttctataattaactgctctagcaacgcgcgttggatgaatcacgggaaatgctccatccgtggccgatcatcgcggtgctcgtagagcccctggctgcctgctattatgcgacctgagtgctttagttactcaacagaacgacgaaagacagttcggcatttccctcggtcccactgatcagcctacaagaatcgaaagagtatcacttagactttggccttaggaaacggctcatttatttccaagcccctgacgatctcaggctatgacaatattcacactatcctgtgcgtagcttaggacaatgcatatccgctggctcttcttccgctctacggcctactaggataagcacttttctgcctctcccacgcgggcaatgcccacttcaccatatactgggacctgaggagttggtccgcctgggtcgttccgcaggttcaaacgtcatcatagctctgaggaagtcctccaacgcacgtagttcaccacctgcaacgtcccattgacacgtctgctccgtctcgccacggcccatgtcccaaagtcgctgacgcagaggccggaagacgggagtgctgatacggcggaagttagcgacccatgacccatccttctcgaagagttcggaacgattcgcccaagagtctcaccatctcatgggcggttggtccagcgtattgaccatttcggcgataatgtcatctcggtcccaggcaaatgtttcgaagagtacgcgctcgcctaagagttcatacaagttaacaccaagtgtccatatatcagctgcggtgggttgaatgatgggttcattaaataaatcttctggtggagagtagagagatggggtatggagagttggtgagggagtctgtgccacaataaaggacgtcccgtagtccgagatgatgatttccgggtcatccaactcgttggcaggcatgctcaaagccatgggatagatggcatagggtggtgcgtggggttcaccacgctttccacccagtcgtatgataggagcctcgtggttgtaccaaaacgcttgtatagctcagatgtggttaggccgtcgaagttcggtatgcgtaagagaaaattgcgcaaatgaagatctgcttgtaattagtatgcgggatcagtaagccgggatgcacaacctaatgacccccacctccgtggaatatgccgtttgcatacaattgagacaaccctaagaggagctgggcggcagcagatctagcagcgtccggcggaaacatgaatttgggctgtcctccttgggattagcaacattggcaccagcaggctctccgaccaagcaccgatgatgtccatttggaccatgaaacgagaattgacctagtagcgatggagtgaatcgctttccagaatgagcgaggtcgctcttcatcgggaagtggttatctggcgatgctcttgcagtcagtatctttagggatacatagcgctggcgttggtgatcgcgggcgagccaaatcgttgaatatccaccaaaaccaagcttgtggacgacggtgtaacggccactacacaaggtgtctccgatgagagttgggtggtatccgccgggtacatagtcctcggaattttcaacatctgcctcaggatggtatatatcttccacttgtatatatgaggagtcagtcatagcatgaaggcatcgaaatgggtgcggtgacggagggactctgttacgacggctggtctttggtgtgaatggaaaccggcacgggaagatatcctgattttgtcggcgaattatcgcgaattatcgcgaattggaagaatggacgagggagtctccagccatggttcaatttaatcttcatgtctttgccgggatcatcgagtcgacgcgctggcagtactgaaagatggtgtgtgactgaggcctatctccaccagccacgtgtgtgacagtcagtggctgtgttttccacagctcggttgtccgagccacaagccacatcgtggcttggcagtagcacacgacatattgattttaccgcaatccttaatggcccccctatagaggggaactctccactgcgggtgatattttccctggacttattattatttggttgtatacggagtatggagcacggagtacatcgttatggacccctttttatacgaattatccaaaggccgaaccgtggaaataaatagtcaagctcccgagtggagcaaagtcgctcctgatctgtaaagcaacccctctactccgtactccgtgctctgtacggagtatgtatatacggcttattgtgacacgctaacattggataggggtcacttggcatgctgaaatcgaatcggtcatttggctgagccctgcaaggcgatggagttgtcaatctggcctgtcagctccaggggctcgtgctgcactttatatcgcatctgcctaatcggagtagacgtgaacttgggcgctaacatgtaactcctagaagtgggggcatcattctagtgttggacagatttgtggagttgtctctttcggttctgggcggaaggtgatggtctacaacagttcgcgctctttcccataaaagccctgctcgctcccccatttctaagttatcctcattttctcttccctccttcatctctctatcaccattcattatgtcgtacgctccaccttacggcgatccttatgctcgccctccctcagatcgcccaccatacgacccctacgggcgcccaccttctgatccctatgcgcgccctcctcaagatccatataaccgtcccccctacgacgctggtcgcccagcatacgaccgaggcccatacagtgcacccccgcctcaagcccgtccccctccaggccccccgcctcccctgccccagggctgggtccaggaatgggagcccagtactcgtcgcgcattctatgtagagcaggctactggtcgctcccagtgggaggcgccttaccagcagcctgcctactctggttacaatgatggttctcgcagtgttcctcctccccagccccaaggaggctactatgcgcctccccagggccctccacctgtgtcttacgatgatcgtagcgctggctactatcagcagcccgagcctgagaagaagagcagcaatgctggcaagtatctcgcagctggtgctgctggtttggctgtcggcggtatcggtggtgctttgattgcacacgagcttggtatgtgatctctctgtttgggttgaatggcttgtttttgcgcatgctaattttttatttttttagacgaggactcggatagatcagatcgcgaagatgcttacgagcagggccgtcgagatgaagaagaagaggctcatgagtcagacgatggcggttggtgattgtgttcacccatgggctgttgcttgaaggtctttcatcggtccatcgtttttctaagattcacaatcttttttgctgggattgaggcttgcattttgcgaaggtttacatcattaggttgctatcacttagcattgcatcgagatatttctctactatcattttttgaaaatgcgaaccacctttaaaggcaacaattgttccatctttacttccaacacaatatctccccatgcaacaacccaaaccaggcatcttcatcttccacaaactgtctccatccccttgcaataacttccaaatcctctgactctgcgaagccctcctcgacaacattcttcgcaaacccagaagatctagccctttcctccatagatccaccccaatacaccctctccccgtcactcccaaaacaccaagcccccgcactcttcttcactctttccttgtcaaacccagcctcccgtgcccaaacatgaatcatcctcccgggatgtggatgaccacctttagaaatttgcatgcgctcggtaatctcgcgccacttagcgatccccgcagactcgggataccagctcagctctgccgactcacgacatgcaacaatgccgccgtccttaacgacccgcctcatttcctttagcgcatgaactggatcagcgatatgttgcagaacctgatgggcatgtaccacgtcgaatgtattatcctcgaatggcaggtcgtggatgttcccctcttggaaggtaatgttggacacgccttcggcttgcgcaagggcacgagcgccttctagtggatcaggtacgtactccacacctatgacatgtccggatgggacctgttttgccagggaaattgtgattgagccaggtccacagcctacatccaggattttcatgtctggctttaggtgtggcaggaggtatggcgcggagttgaagactgtgcgccagctgtgcgtgcggaggaccgagactgaatggtctgttgtgtagacttgagacatattcgatgggttgtggagttgtatttgtgattgtaattgttggttttgttgaaagagcgttgttgggtgaggtcggcagtggattttatagttgcgggaatctagacctgcttcggagttccgtaatgatcttcaatatcagtggccatgccttttaaggttaattcaacaccttcaacttggagcattcaattgtttcttgtaaataactcgtgaatgataagagtctaaaccatgagatcaagtactaggcaacaagaacctgactttagcgtcacacagtaagtgcttgagatacacaaacaatgcgtgtttttcgaaaccacatacccaaaagaatgcaaagtgacctgtgtacatagttactgttaagcgttaactaagaggtgcccagcatgacttcatagcttggcatttagtgcggaactccgaaaaccttgccggaattccgaactctcctgggattccatttcatcttcaatatggacgaatcagatagatacgagccattaatccctgcttcacctcgatttctccgcactgcgcgaagaaaggcatgccgaaaatgtgtgggagctaaaactgcctgtgatctcggaaaaccgaaatgcaagcgatgcagagatcgaggcacgagttgtgaatatccaacacacgtcaaatcaagaagtgctgctagtgcagagaatcaacacgccactgtgaatgtctgccctctcagtaccatttcttatgcaatatctccggattccacattgccagagggtttggtcagaagcactgggaatatatctcacgccccgagttaccccattacggataatggaccaattcgtccagataccactgctggcctggacttccatcaaattgatctagttcccatgaccgatgcagaggaaattcgcgatcgctggttacgcccctacatctcgagttcgacgggccaagaacccaagcagttgaatgctcacaccatacagtatctcacctgcgtgttgaaatcgtatcttagaaatctacttaactcaaaggcaccgccttttgttcattcgatgcagcagatggggacttgtccgcctgtcttggcttattgcttcaccctggttcggacatggttgactcggattcctgggtgtgaacctttgattttgaggacgatgcgggaagagatgaggaatattgaaaaccaagtatgttggcaccttattattcgttgcatatctgcctaatattacacaggatgccattcgaagtgactttgatagcctatgctcgttccaggcgtatctcatctactccatgacaatccatttcttcccccgcccagacaccgtcgaagaacccaacaacttcgatacccaaacgcagataaaattacaagaaattgctttccggtccgccaaagcaggtctcacctgcagagcagaagaatctcagacccggccgagctgggagtcatggatagtcgcctctgccaaacgtcgtaccctctttactatgtatctttttaccaacgtctacaatacccagattgggctgccaaacttcgttgctgaagaattgagagggattatggccccggaaagcaaaatactctgggaagcttcagatcgtgccgtctgggaaagagaatacaatcgccacttgtctcgctgggaggatacgatgctcgagatatcagagctgtggaggtctgctgatactggaacagacgcccggcgggagagaattgagcggtggctgcaatctgctgatgagtttgggatgatgttattttctgtttgtgcacatatccatggttgctagtcacatatttctgtgggcctaatttgagagagagcaaggatactagataccgaataaatttagatcaaaaccttgcagttgcttggttgcattgctctgtcacaatatacataaatcgaatcgaaatgtccaaatcacttcacttcttcgacatactggccatctgctcatctgcagaatccagaacagccttgatgggctcctttgagatcatgcgctcaagccactgcttctcgtttgggaactcatcaacgtcgaacccttcatcaacgagtactgtatgtgccgccttttgccaaggaatgaacgctatatcagcgtatgacatcttgttgccaaccaaccagggaccatccccaacatgcttgtcgttggcctccttctgcttgcccaaccacttgtcaagcacacccgtcacacgtttcgcttcttcaacatagcgcttcactgcgctagggagcctctccgcgtggtatctcttgaaccaataagcttgtccgtagtacggcccttgaccagagacttggaggtggagaaacgagcgtgcaagctcggcttctgcgctgcccggtgtaaagctgagcttgcggggttcgttggtgtcgtagcgctctatgaggtattcaataatagcgccactctcccagatggtcaggttggtgtttgggtcatggatcgaaggtaggcgcccatttggattgatcgcttcgtactcgggttccttgacttgagcgaagccgactggaacggattcaaatggtacttcgaggagcgtgaggatgattcccactttgaggggatttgggccaagaatgccaccatagagctgaatgggtttgattgtgggtgacatgttgtgattcaactgtgattgaagctagaattgataattgtgatcatatttacagtgacgggtttccattttatatgtcccaggggttacgttcaatttacttcttctcagtcattctttgtgattcctattatcaatcgctgtggatagttaacctgttggatttgtaacattgtccttagagttcgtccgttgtttgtccgatcttcaaaccgcgtctgaatattaagtaatcttcggactcgggcaacttttaagtccgaagaccgcaccttcggactttcgttattccgttgccggattactcaccagtgggccttccaaccttggaaggttcccccggggccgaggtcccgagatcccgagatccaaccatggattgtaatgaagtcaaagtcgatcactctatgaacatcctcgccatgaagcgtcatgctacccgaaatctgatatatacttgcatcacccatacgactattttgttaattcaatcttgaccaagatcactatcatgaacgcaatcctataggctacggaccatctccttaaatacacatccgcactcagaagcgaagtgcggccacggtaggggcagagatcgcgattgtaatacttcgggtcttatgtctccttggaatttgcagtggctgggtagtaactgatggtgaaggcgaaggagtgtacggagtagacgaggtgctcttcatgtctcattcctgagggcacacaatgccgagaccacaaccccgcactcgtgacatgaggttcatatagagatgcctccgcacttttcattttttctccttgtccatgtccatgtccatcccctaaaatcaatctctctattacacatagctaaatagcatcaaatattcttctaccatcaaatcgatcaaacatcagattagtcaaactctcccgaaacctcttgccgactcttgcgaggagctaatgtgcacatgctggcagccccaatcccatatctaccgaatgtgtaccaattccggtctgtttcatacttttcctaccactattgggtattaaaccccgacgacgacaagttcccacattctcgcaaatgtgcgggtgtcgatcgttgtttgcctctagatacccaaagcaatggcgacctttacggcatgttgacagtttgaaacctgtctacgtgataatgaggtctcctacattcagatacataggtctcgaacacatcaagcagtatatattctcaatgtaaatatcatagccaaatccaattcatcatttaggtacatgccacaaagttgttgccgctggcaccggtgtgagtaatgacaccagctagcttgtcggcgctgttgaagataacacggtccgcaccaggagagctaccagtatagaccttgccactgctaagaatggggaactcgtagtaggttcctgaaacgggaaagctgaagccttcatagttgtggtactcgtgagggtagctggacacagcatcattggcgctgtagagtttgtatcccgctgcctgggcggcactgatggcactgctggtgtagcagactgtgccgcaagtcgcggcacatgcgcgagcttccacatccaacggggcagcgaaggcactggatatgaagacggaggccaaagccaggagctgaaagttgtgttaatagctgatggttgatgctattgatctggaagagggtattaccttggtgtattgcattttggcgatgtggttggataggaaatttgagtgctcggctggctatgaatatttctggagttgtagaccttcaatgtttctgggaaaggtgatggtttaaatatgccttgtcggaagtctttccgcattgtgaagagagtctactcgctatcaatgcgatgttacattctgtgtatccagccgtcttggtcttaattggcaatcgtatactgcaggtccaaatgatcaattgacaacaaccataccgaatgaggtacatccaccgagcggtgaccatgaagtatagaggtcaaaccgaggtactagatagtcccgattggtcgattggggacagcgtgaagaatcgagtggtgctaggacttccggagtcctgaagatacgccctatccgggcaggtgatcgacgggcggggactatgtgggatggagtctcttccttagacccatgcgcctgagatgaacagggtctctctatcgggccaatcatggcggcaaccgtcggacacgatgttgatctaatggtccattactcagccggccatgtggggatagacatattgctgtcggcatttgaacattgagtgagaaacagtggactgcatgcatctagctgtgaacaaaatccaagccctttgcttgtcgagataaggtatttcactcaattgcgcttcgtatatattgttttcccctcatgtgtccccgtgttccgacggtctccgtgctgatcgcttgaattgtcatatctggcccgctgggtgccaactaggcatgttttgtttcttgcttttctgttgtcaatcgcacaaggccacattcggcagttaccctttacacggtggattagatgcaaatgtgtcatatgctagtctgcatataaccgaagggtagcttcagattgtgtatggatgggtatagtataagataaagggtgactggtctaccctataacaacggaatatatgcgagaccaccacttggcaacctttttggatgactcgggctcttccgaatcgacgagctcccttcgccccgtccagatgtccatatcctccagtcggacgacacgggttttattccagaacttgtacacaaccacaaacaatacaaacacagggagcaggatatagttgatcacaaagtccgtcgagctaaagggattgaggaagcaggtgtacccctgaaagaaaacgaggaaaacatttgctgccagcgcaaggtaggttccccatgggtaaaagagagcctggtatgggagctttgatgggtcttggccttgcgcgaccagggcttttcgaaatcgaatatgcgcaactccgattaccgaccaaacaataaaggtagcaactatacttcgtcagcagggaacaatggtgggaacgggcaaggaaggcaaacataccccccgaaagggttatcaatgccgagtagactctcccagcactagaggactgttccaaaaacacaatgcatgcgaagacgttggtgaaaactaagccaacccatggaactccgagacgatttgtccggccaatgaattttggcgcttttccattgcgagacatgaaaagcagcgttctagatgccacataaagcgagctatttccagcagaaatgacactaatcacaatgagagcattaatgaggtgggcagctgggaggatcccagcatcctgtaacgagattgtcaagggggagctggctgtcttcgacgttgtgcccaacaaccttttgtcattccatgggatgagcattccaatgaagaagatggtacctagatatagttcagtaatgcttcggtcttctgttttatgtgaactcaccaacgtagaaaatcaggatacgccaaaagacctgcctgatagccttaggcactgcttttcgaggattcgtcgattctccagcagtgacaccaaccctaatttgactgtcagctttcgccattttctatcatcttcgatattggggaatatacatttcagtcccagcatacaacgccattgattgaatctgcgaatgcccccggggcacgccaatattcaaatccaatggcgcgcggtccaatgccacctgcgctgatgataattgcgagaatgaaaaagacaatcaacgccaacaccttgatactgtattgcattagtcagtttcatgcttcaaacgtaagcacgcggaaacgtacagagatagccaaaattccatctccccataggccaaaattcccagatttgacagggtaaggaacatcacccagaagatcaagatccagccccattgaggaacagcatctgtccagtacccaattactagcgatatggcgttatattcatttgcaaggacctagagtgtcatgttagtaagggatgatccataatactcgaattcccaatgtatgccgtacagttacccataagtaccaatatgcccatcccagagcaaacgcaagagagtcgtcaataaagcgctccgcatactcggtgaacgatccagtcacggggagtagcgtggccatctcacccagcgattgcctgtagccattagaatcattcttagggcaaggaaatacaccccttacatgacgaagaagacgataatgcccaccagcgagaaactaatcaaagcccctgcgggtccaccctcatgtagtgcattgcccgagctcaccagcagaccaggaccgataatgcctgagaatactttagtcaacaccaactacgtaaaacaatgtgcaagcccacctccaatagcgatcatctgtagatgcctagacttaagctgccgcttcaatggtgcagacataggatctgttgcaatctcttcatccgatcggtttatctccgatcggaagcctttcgtagtgccatcctgaacaggtcctctgtatgttatggcgctgacatccgttttgtccgtcatattgaggaattgcatacaaataaagagaagatattgaatcagtcaaaacacagagactaaacttttttatttttttacgcaaacacccctagacatgcgcccatgtcaaggaatgtcgtgataaggcacgggagcggcgtcatgggtgatcttgtggggcgatttaggcgggggaagttacaactaaaatggccacatttgaacactaggtgaatccagtaaatgcataggggttaattggccgatccattgacgaaacgaaattccagcagtttcagcatcaaaaacagccttgtcgctaggttcaatcgagtcatctgtgctttgaatagagatctcatggctgcggtcggcgatatttgccatggagaatctctgtagcgatagattttctccaaagaaatccctcatgatccacggagggtatgtagggggttgaagggatgtaagtttgtccggatggcagttgtccggctggttgagtataatacggagttgaggttggagtgtagtctgttgaggttggtgtgtaggctgttgaacttggattgtagtacactgaggtcgggatgtagcctattggacttggagtgaaggctcttggagtccgagtgtgggttgtttagattggatcatagatatttgtgattgtagaaatagggactggaggtgaacgaagcctggctggggttatacaataacaaattgatggataatctgggaacaatgatggtgaggtatcttccatgatcacctcaaaaatcgtgaaaataccaagggttcctttgactttgaggagcaatgatttcaaatgcttggagttgatgcaagtctgatggagatggagctctttgagccgattgaattcgatttcgctagacagctcttcaagagaatagtcttgcgagagcgcaagtctttctaggtggggagcaacatggataagcagagtgatctaggttgtactcatgacataagctggctttatgattctgaaagctatgcaaacgtagaggtcctctaaatcacccagaacggattgaacagagctgtattgctcttctgtggggaggatttcgggggcaattttaccacagcaatcaggattacatgtctgtaactttgtgattttccgattggttccactgagcgtctgcaaaagccttgacgaggctaaagagataatcttgtccattacgcttccgctaccatgaagcggctcgaggttcttactgccgaatcggaagtcgacttgattaaagaggcggcgccagccaagaaatcggactttttcttgtcgcgggtcgagcaaaaagctcgtcgtgtaatgtgcaagtccaaccgtgtgaaggttgtcgaacctttccaagcatttacgtagccgagtgctaaaggcctccaattctagaagactagaattgtctgtaatcaagactttatacgttgaaaaacgagcctttagttcgtcattgaataccgagcgacaactcttcgatgacacggcgaattcggaaatagaactttcactttctgcatgggagccatcgaacacggatggaatcatcgacaactcttgaaatcattctcaaataccatctgtttcggcgagtgcttctagttctttaaggctatcgcttgtcgcaatgaagcaaatgctcttgagatattgaatggaaaatccttcgagggatattctgtgaagtgcgcgacatgagaatctaagcgctcgccatttagagagctgtagaaagctacagactgtcgacataacttttactatgtgttttggggtgcgcagctcgtttaccgaatacgttataggcctccgtacgaggggaagtaatgactaccggttccctaaaattatgagaacggggaaatttagccaagctgaaaattagcgcagtgccaaatccacacaactcaaattttacccttcttttgaagcgaatgtggtgttagttacaacgaacggattagactgataagtacaatgaaggcaaagtgctcaaaggtgtcccaaacaagtgtagtttggtcatcaaagatggtcagtatgccacttttatcatcattggcattaagcaaatcactgatgggtaatagaagcataggaaggaagttgacagaatggcaaaccatagcagcaaggtaacaacaactcaattcttggtattgaagggccaatgggattgccaggatgaaattcatacaccggacataggaacttcgagtacgaagaacttgggaagggttttgaggatatggaggtatgcatttatttttcttcggggctctctttgtttcaccacaaaggacggattcttgataagggaaggctcggatataaatgaacgtccagtgtgggaatggaagggacaaagggctgggagagctgagctagaaagatggaatgatcttagcaaatgtaattcagtaatatgaaatggggttcaaataggaaagttgcaatcaaatgtaggctcagatatgagggttttcttttcttcagtcctcggctttttcttttttctttttggctgacaagaacagatactacacataagccgaggtgtaggtgtaaacccttttcatcatcgccaaatgaaaacaatggaacatagaaatggacttacaattccattagcaagtgctattttagaaatgagtaggtatatcgagtggcgagatagcaatagcggatctgtaaaggcagccacaatattagtaaaattcattcggtaattgaaacgttcaattaggaaggcttctatcaaataagtgtaggctcagaaatcggggttttttcttcagtcttcgactttttccccttttttttggctgaaaagaacagatactacacataagtcgaggtgtaggtataacccttttcatcatcgccaaatgaaagccacggaacatagaaatggacttacaattccatcggcaggtgccgtttcagaaacgcgcaggtagagaatggcggatctgcgaagaaaatattagtaaaattcgattcaggaatcaaataggcgttcaagtaggaagttttccatcaaatataggctcagataggtattttctttcttcattcctcggcttcttctttttttttttttttgctgaaaagaacagatactacacataagccgaggtgtatgtacaacccttttcatcatcgccgaattgagagctggagagtgtagaaatggactcacaattccatcggcaggtgccgtttcagaaacgagtaggtatatcaagtatcgagatcacaatagcggacctgtaaaggaagcaacaatgttaacaaaattcatccagtaattgaatagacgtccaagtaggaattttttcatcaaatgtaggctcagataggtattttctttcttcattcctcggtatttttttttttggctgataagaacagatactacacataagccgaggtgtaggtataacccttttcatcatcgccaatttgagaaatagggtgaagaaatagacttacaatcccatcggaaaatgctgtttcagaaacgagcaggtatatcgagtatggaaatgacaacgggggctctgctaagaaagcaaaaaagtccaaactggtaggtcagaagctgatccaaggcacgagaacagctattggccgtcatcactgttatattgacggtcaccaagggcaggagactagaagaaacaatctcattagcagatgaaaaatcatgattttgtgaatcaggcaatgggtttcaaacggtgcctcagatatagcagtgagttcatcagacatcagcgcacagaaaaagttttgaatatcatcattgcgccaccgaaagaatatgaaacccatgactaaggcaagaggcaagaaggataatgtgagttgggagggggtgcatacacatagatggagttgggtcaaagcaggtaacttgtaggcactagtcaaatgagatatgagtaaaatataagtcacatagcatctgagggaaaaggcaatgataactgtgtcatcttatttcatcgtcatcatcatcatcattgaaccgagagagagtggacatgaagccatggaaacacgtatcaatcggcgcaacaatagaatgctgtgatggagaggatgtagggggtagcaggagaaaacgtaccaagaacaaggtgatggaaacacaattaatagtcaagaaacacaaagacaaaagcaaccttggagaaacttgcgaacgagtaagcaaggacgtcgacgacgaagcgaggtaaacaagtcacctaggcagcgaggtcattgacacacgaagcaagagatcttgagactcaccaaggtacaccctgcaatggtgtagtgtaaacaagagattacgtgcattggggtcagaaggtcaagtccaagtcatgatgcaatgagaaagagtacaaggatggagtctctgaatttggatgcaataagagagacagagagtggtgtaggaggaaagaaagaaacaagacagaaaaattgagttgaacaatttatactcgtactcaatgctgattggcggtgggcaggaggttctgcctccgatcggacgctgattggttggatttagtgagtctatggtatatgtacacattgctcggatgtgatagatgctgtgaggtgacaggtttaaccctactcgcattaacatagatattggcaccaaacttggtgaacttgtagctaggatagtagtctatatttgtacaaactttcacattgtgaatcgatgcagtgcgcgagataaagctagctacaatttgctcgagcatcggggtttccgggccaggtacctagatctattccaactgctttggcattaccgctttgcgctaccgcctcatcattgcggcgattgactccaagtaatccaaatctcagcaaaagaaggaagcattgcccacgacaacatgaggagtccaaaaggaaacggacaactaggcaaaacgactaccgacgagcaaaatagccatcgacaactaagcgaaggaatacggactcaagccaataggccaatatctcaggaaccgtgggcaagacaagacgacaattcattccctatggtaacggcaagcgaattgctttcgacaaggggttgaaaacactatacatatgtccagcagtcctcgacaatcaacatggatccccgggtcgtttacaacggagggctaatttttcgatgaaagtctcgccccatttcgcactgcccaaagttagcaactgacaataggaaagcaggaaagtccttcgaaccttgtgttggtattgataaagtctcgaagatactcgtacttgctccttcgttcggccgggtccagattcaacgcattgaagatcgcctcggacatttccgtcttgtttgcaggatggaacgggatactaccctttgtcatgaaggtagccgcgccagcaaattcggagagaacgaggacaccgtgacgctcttgctggcatgccacatactcgaaggccacgagattcattccgtcgcgggtagaggtgagaaggcaaacatcggctactgagtacaacgcggtcaattcgtcgaatggaacggagcgatgcatatacagcagcggagtgccctcgggtgtggctggctagttagtacaatcccaacatttgtggcaaggtcttaccatgtttcccgttgatcttcccggcgatagtagacagttcggtttcgagctcctgatattctttcacttcctcgcggcttggaacggcaacttggataagaacgaccttgttttgcagttctggatgatcatcgagaaaagcgtcgaatcctttcaatttttgcgtgaggcctttaatgtggtccagtcggtcgacgccaacaattaccttgacgcctttatagcgttctttcaagtttcgaatgcgctcttgaacctcgggctttttcagggtgtcggtgaacttttcgggatcgatgccgacaatgaacttgtttacacagactagccgatttttgtactgaatttggttgggaatttcggtgcgagcgttgctgtggtggtgttagttgatacttcataagcttgtggagtaagggaattagggctattgctcacaggagactagcacaggtgtcgatgaaattttgtttatattcgtccgtgtggaatccaatcaggtcactggacagcatgccttcgatgagatgctttcgaacagggagattcctccaaaagtctcctgctggaaagggcgtgtggagtgagaagccaatggcacaggttttaccttgccgtttgagtcgatcacggagaagctcgggcagaagcatgagatgataatcatggacccagatcaatgtcccagtatccgctgtctcagcaatcgcatctgcgaataactcgtttacccgcctatatgcttgccacggagtttcgtcgaaaactacacctgattgataatggagaattggccagaggatacgatctggcggtcagcgtggatcgcggtgttagggcacggagcttactcgagaacccgttatagtgctcatgggccagggtactatcgaggaatatgggaacggcattatgttctcccaaactctttttcacatcttcttgatcctttgggtctttaacttcgattcctggccagccaaaccattggaacttggtggacttggtcaacccagatagagaagtgacgaggccaccactcgaaatagaagattgaaaggcaccattaacacgtttcacagacaatggaagacgatttgagacgatgatgagttttcgcttttcgtcggtgattgaacccatcctgttacaacagctggaactttatgtatcttcaacaacaaagaacaagtgatgagtcacagacagaattcggccaaaatgatattcagctttgagttgaaagaagcagaaaccaaagaggaaatctggatttatacatcgccgcagaaatggcaaatggcaaattgcacctttacgtcagtatgaaagaaaatgcttccctctcctctttattatccatatgcctagatctaggccacattggcctcgattacattctacctcaaatattccatttgtctggaatcagctgatttaaaaatggttggttgacgatccttccgggttctatacaagcagagatataaaatcgacaccggtcaatccgctttacttgccacagaaattgtcaacatatagataccgtagcaattctccatctttaatcattagattaattatattgatctatttacaaatttccagagctgcttcttattgcaagatttcgtcatgggcatgtcagagctaacgcctcaaccttgttcagcgatttgcctcttttcgttcgatgaagcaattcagtacagatatatacgaacattcagcaaacacaatcactttgaagcaagttctcaagctagtggtcaaatctaaatccttacaactttgcctcttattattctttttgttgtcttgaagcattggctctctgaggagctccattctcaccagttttcatagcaaagtcccaggatttttggacggattttgcgctctgatccaaatgcgcttttgagcctattaggggttttgccgttctacacgttcggaaccctccgtgactggatggagcttggttgagatatatatagatctcaggcaggctaatctcaaccctttttgatatgttctcactcagctgcagggcgacaggaacgcagtcctataggtgctaggggccatatcccaatctttagttaataccgatgccttaatgagccgtctacttagggagaagatatatagaaaagatacctcaaaatatataagaatacatcttaaaaagactactatagagactaccgtcgagataactagatcgtgtcggttgaggctatttttgtaatagtacggagtaagtcaggtggtttaattcttctgctagtcataattcaggcgtctaggcctaaataacatattgaggcatcagtatttagtaaacacaggggttcggccccttgtgtctatatcactgtgtatgtaataccgttcggaggcgaaatatgagatttatactggcctaagtaaaaacaagtacctatgtagtacgtatatcagaggtagagacagcagagagaagccagtatagccccagaattaaatcaactagaaacaaatacaagaaaagaaaacaccataacgatggtatgaaataaaacaccagtgccgggccaaatgaaaatcccaacgaatatgatcccatccccgctggttatgctacaaacccatccgctgtaaaacaagtacgccgaccaagacccaggcccagaaatgagaacagtggcttaggtaaacctgcgcttagttgggctcggtgtccggaggtgctgctcacgctcacgagagcgctcggtgacaaagtccatcgcccgtgtgttttcgagcatcaggggctgatcgtatttctcgtcgtaagcaactccttgggtttgccgggggtcttgctgcccgtagtatccgaaggaggggttatgctgcagctgtgggtgcatggattggggtggtggtgggtgttgcgcgtagttctgttgctgaagacgttgtctcaatgagcggaatgaccagttgctaaaaacggtgacagtagatatggttgcgaggaagaacagctagtataaaagtcagtaaagatccaaaactgagcgcgcagggaaactcacaatcgccttccagctaatggggtcaatgaaactgttgatgataatagccattgtatgagcggagactttggcgcggccaacctttgctggatcacgattcatacaccgttcccagttctcgcatatagtctccagagccgggacgcgactcgatcgcccgcagtcgttgtcgatatagttttttgtgcagaccgccatgtcggccaagatagtatcagacatttcctgtgcagcttgctcgaactcgcctcgaatggccgacacaaatccgaaaaccacgtagacggccagagagaacagcgataggttgaccaccagttgggcccaccacgacaggatggcggggacattcgggtgtgcctccagcatgctgaagaactcagaccaggatgagactcgcgagcgatcctgttcgaatttctctcccttcccttgcttcgtggctttcaccggcttctcctccctgctgctgggccggtcttggtcgctatcgtcatcgctgtcgactcgtatttgccgacctagttccttgtctctccgtcgtttcttttgtatccggtgcaaggctgcgttggagtggtgggttagccgagggatttcgcctcgccctgggctctgcggattccggccatgaaagttgaatagtgacgaagttcccttccctgacttgtattgctgctcgggcgtgtcctcgttgtctgcatattccggtgacgacatattctcagcgccagatgaaaaatccacatcaaatttccgtggtgtctggaaagcaggttggccgaatttagccttgggtgatagtggtgcgggttgttgtcggggctgtgaaaagaggaagggttgagagtttggttcgcggagcgagggtaacgcttgcttctggggcgattcgaatgcgctgtatgttcctgtaggagtgtcaggggcttgtaattgcagttgtcgtcgttcagaccgggatacgaacgtttcttgtcatgctgcgctccaagctggtagaagggtgaggtcacgtcgccgggggctcgagtttgccactcaaagtccattggactctctcccgttcgtttgtccatctttgtttctcgctgaatatagatccgtagcgggtggatggtgagtgtcaaaagtcgggaagttttttgtttggggtaaacatccagatcccgtagcaaccttggcatcgacactctttatctccgacaaggaccgtacttcatcttcttcgcacatatctttgctttgttttgtggtgtatatacagctttaggaaagagattttaagcagtcgtgcttgagcagacctaatcgaaacattgacatcggcccgtggaatggaccacagatctagagatctacaacgttgatattacaaatgtatagacaagactcaaatccaacatcgaagcaagtatgatcatttgacgcatcgggcgaccagcacccactatgggtattaaacaagatggaaagcatacaagacagacatgagaagccatctactcatccatctgccactggtattccaaagcctcaaaccgactcttcttgttccgcgacgtaaaccagtctttctcaaatccattgccacgatccacgccatcccagcggtgccctggccggatcccatatcgattaggctggaatgagccctgataaagcggccgccccgtaacactggctcccgcatcacgccgggcagtaaggaactccgcagcgggatcattccaccgatcgcgggccctcatatcttcgttcagttcctcgtcctcgatcgtccgtgcaagtggcatggccttgatatcttgtaagttctgtcgtcgctcctcgcgctgctgtcgctgcacatctcccatcagcgcctcgcgcgcctgttcttctttctcgcgcttttcttcttctgcgcgtcgggcttcggcgcgtttcatggccacgttgatgattcggccggatgcgtctcggtagattgtttcttggcttttttgattcactgctgagggatcgcggtactgtgcttcttcggccttgcgccgcttttcttgggctttcaccattgctgcggtttgggcggcggtttggagaccccctcgtactccggactccatgcgccctgcgccgtcgtcttcattttctatcataagcgcatcttcgtcgtcggggtcttggtgggcggcgcgttcagctgctgcatcggctagaattgcgtcggcggcttcttgttcacttccttggccggacgtgggtcctccgattgtcttccagcttgacttctttgcgcggcggaattctgtggttctggcggatgtgtcgaaataaggtctatcctcatcgtcttcttccgtatttcctaatgagcgaatgtctggtggatcatcatcggcaatgatgagaccagagcctgcagtatcgatggctttggtcttcttgcgcttcttctttggccgctcggtggtagggtcagcggtcagatagttctttgccaggtagtcggcgagtgagccaggcataatttcggtatgctgtatgtgaggaatgtgaaatgtagaggtgcaggttgagctcagtgatttaatgatccggaggaacgtttccccgaactgtatgccgcctagcgctaagttaacaaggcgtgaacgtcatttgattatggactcggcaatgcagagtgagacttcgaacttgctcgctgaactaattgagaggcctgtacaatgccacgctccgaagaagcagagtggtgggccaacgcagtctacgaagccatcaaagagattccccggggcaaagtcacttcctacggtcatatcgcacgcctcctcggtgaacgtatggatgcaattatatgcttgttggatatatactaaccatttttctttggtaatagctcagcgcccccgccaggtcggagtctgtctcaaggtgcttccgtcaccggagtctggctcgtatttcaactcgaacactgtgccgtggcagcgagtgattaattctaaaggaatgatttcgcatcggtgcgtttgttctaggctacctattccgaattcttatatcatatcaaactggaccatataatctagacttgaaacgaacttttatacgtgttcacggctgacatctataacagtggacccgggagtgcggagcgtcaggcagaagctctcgcacaagaaggtgtggaggttactacagacagcatgggcgagatgtatgttgatttttctcggtatggatggtttccaagcgagctgtcgagcgagggaacggatgagcagccagagaataacaccccataaagactctcgaaaatcctcatacattggggttttagtgcccttgcgttgcatccgagcgttaacaatgattcaaaaattttacggagattgaatccatacatagcaaatagtcataacttgtctgtctggagcaaatctagaaggacttcccagacgagtgggaagtgggaagggatgatacaggagactaaagacccatcacgaatatgatcaatggaaatagaaagacgagtctatcggggagatatgagatcgaaaagcaccagacacaaaaggttgacagacgtgcagggggaaaggcgaggcataagcatacgagcatctcgaataacaccccatccaaccaactaccagcataggacgaaagaaaagctttgaagaagaacaaagacataaaccaaccagcatcaatccgtaaatggaaagagaaaaaagatcgttaactcacatcatcgccataagggcatgaaaacccaggggatagtcccatctaggctaaggaaagagaacaaagagggaggggatcactaaggtcatcttcatcgctttttgacctcagcagcccagccttcaataccctccccacgagttccagggacaatgcccagatcgatcccatccataccaggcgtgtcctttatccactcatgagctgccataccaccagcgttcgccctcttctccggtgacagatcaagcatgggcaataggagttcgctaatacgcatgctctcctccatggagtagtggtacttttctcgcaggacgtcgggcagggcccagtgacgaagtcggtggatattgcgcagttcacccttgcgattgaaaatttcttgggaccatttgccggacatgcagagtgacttggggaagggacccagtagttcaatgatttgggcgatgtgatcatcgtccttgccatatttggtccctgattgggggtcgaagaggtagtctccagtgatgagttcgaaaacctagacaattagcatgttgttcggcttcggctgtgattgatgatcatgccactcaccatgcatgccatactccacacgtcggtactggcaccccacttagagcccagtatgacttcgggcgagcggtattgacgagtctgaatgtcgttggtgaaatgatgaccgacccaacaagcattgcctaagtctgcaatcttgacagaaataatattgacgtcaagttcttcttccggtgatttgctcgaagagcctttatcgagggaaatgccagacacctcgcgctccagaagatctctgtatgtatattgttagattagatcaagctcttatcaatcagagcaaggcagatgtatgtcatgacgtacgcagttttctctcgctggttctgctgcacatcttcttccttcaccccaagcagttctctcatggagggcgtttctgctgtagatgctaggtcagtttcttttctcgcgcgcggtcgagccatgggtgcatcaagggggactgacctgcaggctcattgaccatctggctgaggctactgtgtgagttggaagagctatgtttgaagtcgaagttattgaagttggtgttgagcggactagggagcggctggctccctgtgatcagtgtgcgtcgccgtctccgcccgttccggttatcctctttctctttggcatctttattggcttcttccttgacatgcgccttgacgatctgctccacatctccaatctcgatcaggacattctccggcttcagatccgtgtggatgattccacactcgcggtggagatagtccaagcccagcagtacttgctttgcaatctgcttgactagcggcatgggaataccgcgatggttccaccgcttgatcaaacccaagaggttctcgcccaggacttcaaaaaccatacaaacatggataccgttgggtcccttgtgttcaaacgagtccagcagactgaccacatgcttccgaccagggtgagagggtttcgcttgaactattttgttgaggagcttgatttcgtcgatcgcggtttcggtgtagtgtgcggcggatcgaaccaccttcagcgcgacatgcttgttggtggttgtgtcccgcgacagccagaccgtcgaaaaatgaccccatccaagcttgcgcacgataatatagcgaccattgttgtatgcttcgcccacagcgacggggtggtatccgcctttgcaataatcttcggagtcctcctcttccgcggtagcctcgagttcttcgccagacgatgaggatgatgatcgcgatgcggatgctttggagtttgactgagcagcgccggttctgatccatgggagattagtaaccctgttcatcagaaatgtttcaagacatacgattctgtagcaccgggcccagggttcgcttcattagtgacgatgggcttcaagtcggtgccctttctcctcttctttccgccgttgccattggcagctgacgcagcaacgtttgccatctgtttgcccttgttgagcatcgccttggtaagatcgactccctccatgatgtggagatttgggaggtcaagctgagaggcggggcacactggcttttggttggttcaagcggaacttagaggcggtggatgttggaggggggggcgcctctaccacctgcacacacagtaaagacacggtaatcaaatattgcagaggaaaagttcaaataaactgggtaggaataatttgaggaggggaaagaagatgtcaaagattggaaaattgcgggtaaaggcaaaggccaaagagaatatgggccagagcgacgatccgatcgcaaaagtcaagttttataagatcaagagaaagatagatcacttcggagaaaaggggagtgttgagatcgatgggatggtattccgcaagcagccacagcgtcgtggtggcaaatatggacgcattgagtatagacaataaatagccttataagaatatcctggatgcatgtaaatgtgaagaaaagagaagtctcagcgctaatgctttgactagtagaaacatagcaagtagcaagtacagcatacgcgtacatgtcagaggagatacattctgtgatgctgactttgttcacttggttatatactgtagatgttttaggtctttcctgctacatccaccttactctacctatcctatccttgactacattcttattcattattctattgaatttcaatcagatagaaagaaaaaaagaaaaaagaaaaagaaaagatcgactgcagtcttgatgtgacgatccccgcttggggtaactagctacctgacttgacctcggtggattcacctcttgaactcttactactctgagccgttcctttggcttctctgtcaccatgacaagtcccttcaaccgccgccctattcacgactacttcatcgcctctcctctggtggccctactctatccagtacaccagatattgctccgtctgcgtggccctcctcgactccctccgcctggcactcaaccaatccgagtagtctgcatttccgatactcacaccctcgaatggccagacgtacctgacggagaccttctcatccacgccggagacctctgcaacaacggttccgcacgcgatatccaagcctctgttgactggctccggagccttccccacccatacaaaatcgtcatcggagggaaccatgacagctacttcgacgtgcggtcacgtctggatgaggatcgtaaagacccagcttccatgggggattccttcgcggcaatctcttcctcgacggcatccattcgctcgttccacgagctgaacgacgactcccgcatcgactggggtgacatacactacctccaacactcagccgtgaccctctcgttcgccgacacctctgcgccctcgcccaccgcccccagtactagctcccgctcgcgctctctcacaatctacggcgccccccaagtcccagccatcgtccccttcggccccgaacacgccttcacataccccccacaccacgacgcctggtccggcaccatccccccagagacagacatcctcgtcacccacaccccaccccaatctcatctcgacctttcccccatattttccaccggctgtcccaacctgctggcggaatcatggcgtgtccgtcctgccctccacgtcttcggtcacgtccatgaatctgccggccaggaacctatcttctgggatgaggcccaacgcgcctgggaaagattgtgtgcctcgcgccgctcgcgtgcacgctttagccgcatgtcttcgctcgctggcttcctccgcgatctcttcgatctatctgcctgggtggatgccgcgcgggtcgtgggatacgggatctcaggtgtggtttgggctcacatctggggtggggagaaccttcatggtgggtggatggtcaacgctgcttgcatgtatcgtgacagtggccggctaggtaacccgccgagggttttttccctgtgatcttccatcggtaagcatagcgttcgctttttggttcctgttcataataccatgttggttggcttgcgcttggtgaactgccactgtaaataaagctgagcggtttacctacgccacaaaaggcgtctcttttcggctattcgcatcttcagcctgagcaactccaaggttggttctcaagatccaccttgtatttcacgttacaaaaatgataattgtataatatatatattggcggttctgatcttggtagcaatagtaacctagttcatgggatcaacagaacctcattgagcttctagttaatgtcagaggggcaatcatagtataaaggcatatatgtattcaaaaaggtatacataccctatatatacggaaaggaagaaaagaaagcaataaatcaaaggcaaatgtagatgtagatggaaatatacgtctccggtttttcaggtgatactgaggctccttctacaaagtaagaaaccttgaattcccacgtgttggtatgtcaacttcaaaatatatctccgtagtcttggcatcaatcatttaagttctacaagccaaagagatatttgaccaaaaagaataatttgtacatattgcatgggtatagagatatatatggactcaatggttatatgcccagacgataccaccctgtagaccgacgcgaacaactcagcaagcttcaacacaaacaaaaatgaactacaatgcagcaaagaggattacagcttcggcttctcattaaacctcggcacctgcaatggatcatatgcactaaggccaagggtatcagacggcacaaccccggagtgcccacccaacaacccgcgagtatcaagcagactaggactgagatccgccacagtcggagctccaatcaaccgcatgttcatctccatctcatccttcagcagctgcatagcacggttcacaccatcaagcccataagcagacatggcatacaggaacggccgcccaataccaatacccctcgcgcctagacaaagcgctttaaggatatcagttgcgcgacgcacaccgccgtcaacatagacttcaatgcgattttcccagccacgctcgcggagcgcaggcatcacctcggccaaaacctcgatgccggaccgcgcggtctcgagctgtcggccgccgtggttggagagcacgacgccgtcgcagcctgcctcgacggcgcgcaggacgtcctcaacacactgcacgcccttcagcacgatcggcatgcgtgtgatggatttgaaccaggggatatccttccaggagagcccggggtcgatgaaggaggagatggcgcgggcggcgccctgggtgcggtcgatgtcatcgccgccggactggacgttcgagccaggatcggagaatttagaacgcatatctttctcgcggcggccgagttggggcgcgtcgacggtgatgaagaggcccttgcagccgcgctcctcggcatgctcgacaatcttgcgcgtgatttcgcggtctttgttgacgtatagctggagccattgcacttggtcgccttgtttggcgtcaatgatttcgtccaaggagcatgaggctagcgtgggaatcatttgtactacgttgtgttcgtgggcggcttttgtgagcaccacttcgccttctgggtggcccagcttgccgagcgccgtggcagtcacgtagaatgggattgagcattttgtgcccagcattgttgtggtcatgtcgatgtgctcgacatcgactagaattcgcggcctgaaccagattttgtggaaggctgcatggttctcgcgcattgtctggttataggttagcactggggatttcgtgcctgggggtataaatcatcatggtagcttacaatttcatcatctgctccgctagagtagtatgcccacgccgtcttcttcataacttggcgggccaccacctcaaagtccagcaggttgtagcaagcctcgagatggggcatgcgggaaatgcgctcttggcgttcggcttcctccgggtcgaaggctttttcttcctgctcaacggttgccatgtctactgctcccaagtgcttcgacgggtccaggaacttgtccagggtatcgggtgggtggattggttcgaactcttcggtcgcatctttgcctgcatacttgaggatgatcttctggccaccagggtgttctgagaaatattagtacacattcgaggagggaaacgtagtaaagaaacacacacccgggaggaattcggttacgtcgtaggctttgccgtgcacaatgatccagcacgagtctttggagttgtgctcggcgacaacggcgccggtgagcttgcctgcgctcatattgaaaaggataagagagtatattgttcgctgaagagtagaagagaggaagtaatgaaagggaaaaagatctagtggaccctcgggataaatgagtccgggggagaaattgcggggagcctctcggccgacttgtcggatgagactcgcctcgtcggatgagaactcaaatgctccttaggtccgtatattaatcgaattgaatgtacggagtattcctaagatcaagcccaaaatccaaaggatctaagggattggtgggggatcgttgtcggagcctcggtctgggtcatttcctctatattggattcagccagtagtacggaacgtattacatgctcggatgttcccttcacaaacagtatttcccaatgctgtttttgttgtgctatacatgctgcattcagaaaagaaacaaccttacctatagattcgctgttgacagccctacattcccttgttggaatgttggggtcggggaaagaatagttcatggcctgaggcagcaggactcacatgactcaatcacatgactcgtcacgtgacttccatcatcagaatacaaaatgtgtatcataatgccattgtgttgaagtgcagtttttaaggcttttatcatcatcataagcttaattcaacgggtaatgtacgctgacaattggacagcaacgttcagattataaatagtggagatcattggacggacgaacagcgagcctatgtacctcggtcttggctgatagcgccaccgtcgatcagctactaagcttctttaaaacctggtttctagcttgaagttcaaagagactacctacaatcaatatacggagtaacgctggtcaagtttgcaacgcgcgtgaggcgcacatatcaatttgtgatctgcatcggtgcagatccataatcgggcaagttcggtcattcctcgcacctccggatatcctccaccctcccacacctccgccatttctccatcttcggctacagtgggtggccacagcccctccttgctgcgtcgcggatgccactgctgacgttgtacggggaaggggctccgcctagtgcactgtccacgagttgtaccatgtgtatgtggcgcataatcgttcaattcgtccatgtatatcgaattgggctaaagcggtcgccaccaatgcttgtagttcaatcgaacggtatagtactgtaggaatcatataaatgaatatttggatcacctagctgaaaaataacatggcaataataaagatcaaccaaccacggaggattcatctactggtcggcttcgccgacagcatatcagaggcgctgaaatcacgactcaagacccccaatgaagcgggtctataatgtgctccgttcctatggatatgcactgtgatatcggattttcatacccaatcaacctcttatcggttgaggtctgttgaggagtcttgatggactgcgatgtaagctaaagatggatctacaaagagtacaagatggggattagccccttcttgaattgtggcgtgaacacgcggacctgccatggagaggcatattctctactatcgtacgcttcaacggtcaagagttttgcattcacgtgcgggaacataaggaaccatcaacgccttatcttcattttctggttgcctttctttttcgtccgtatccacttagttgcagttcgagaaaacttcgaatacgctaggaagtggttcaacgacatcattgcggatactagacgatacttttccgccgaaggcatgcacggagtactctttgagggggattgatggattatcccccatcttttaaagacatgactcgagtcgtcatttgaatggttggaaaaaaaatgaaaagatttataagttttcatacaattcatgtgtcatcgttttacttcaagtggaaaagaggcaacattcaagggaggaaaaaaagccgttgctcacatgattctgcaaactgtatgactccacatgttgttttcggatccgagtagaaaattgtataatatgttcagccttatattgtattacttgtagccaagataggaatcccgaaagaacggagaatgaaaagcattggatagaatattaaacgatctcaataatcaatcctattctgtagagcaaggaggatggcttgtgcacattctatatcaagtaaacaaatatgtcaatccctgtccgatccttttagtgcggcgctagtcctttcgcggcccccgataacatttctttccgacctccttcgggatggggacggcttcccgattcccgatttgcaaccggcgccgataacacttggactccgagtcgcatttgagatcgagtacaacgtctaggtacactgttatttggtagggaccttagcaagcgcacatagcatattcccttgtgcgcaatttggtatcggcaaagccgtcaaccaatttaagcctatggttggtagggcctgtcattcaccttaccgctccaggtacagtccatttgaacatgacgcagaattcatgtatgtcagtctacgggcccaagcatcataccgaagaatatatccacccttctcggaacaccaatcacgttgagaaacattaccgtcgaaaaaataagacaaaaagaaaagaaatagtcaatctgatgtcatcagggacgcaagctacgaagtggatcctaaaagaatgcttaacacgccattagtgatgcattcggcaaataggctccgctctctaacagctctgattcgtcgaaccacatttcctacggtagtggcttttgatattttgctttattttattttcttttctccccaaaggtctcggactcaactcgtatggagtagacacgggggagaaaaaaaaatattatatgccccacgatgaatttccttgccacttttgtcaaactccattgaagaagcagacattcaaatatctcccggtttcctccaggatttactcatttctccacgtatctctatatctccagctattccactcactccactcatacccacgtgtttacactgggaactagtccttcatcacttggacctgggtattaagctatactgttattttctctttctattcttcatcatggcgccgagctatgccggcatgtccggtaagcctctgagtttgacggtgtcgaccatcgctactatgggcttcctgcttttcggttacgatcgtgagtatacattgacttctgatacgaattcaacgttgctaacagtctacagagggtgtcatgtccggcattattgattgcgatgccttcggcaggttcatgcctatcacccggggcgactccaccatgcaggccttggtgactgctgtctacgagttgggctgtctggctggtgccatgtatgccttgttcgctggtgacaagtttggccgtcgtctcatggttatccaaggtggttatatcatgatcattggtgttatcattcaaatctgtgctatcaagggccatggagctactgcccagttctttgtcggccgtatcgtcactggtattggcaacggaataaatacttcgactatcccgacctaccaagccgagtgctcgcattccgccaaccgtggtcttctcatctgtattgagggtggtatcatcgctgttggtacaatgatcgcctactggattgactttggtgcctcctacggccccgatgacctcgtctggcgtttccctattggcttccagattttcttcggtattatcattgtcgttggcatgtactatatgcccgagtcacctcgttacctcatttccaagggcaaaatacaggagggtgagtatgtgctcgctgctctcaatggtcacgaaatcgaatcccacgagacccagatccagaagaagctcgttatcgagtccattgaagctgccggtgttgctgccggtgctggttactccgatctcctcactggtggtaagacccagcacctgcgccgtatgcttatcggttcttcgtgtcaaatcgcccaacagctatctggttgcaatgctgtgatttactacctacctgtcctcttgaagaagtccctcggccagactgagttcatgtccatgcttatcggtggtattaatatgatcgtctacgccatcttcgccacgttctcctggttcttcatcgagaggattggtcgccgcaagctcttcatcggcggtatgacaggtcagatggtttctatgatcatcgtcttcgcttgtttgatccccgaccagaccgaagcttccaaaggtgctgtctttggtctgttcctctatatgtccttcttcggtgcctcgatcctgcccctcccctggttgtaccccgccgagatctcgcctctccgtacccgtaccaaggccaatgctgtctcgacctgctcaaactggctgttcaacttcactgttgttatgatcaccccggttatgcttgagcgtatttcctggggtacctacttgttctttgccgtgatgaacttcatcttcatcccccccatgattctcttctaccccgagacagctggccgcagtctggaggagattgatctcatctttgccaagggttactgcgagaacatgagctatgtcaaggctgccaaacagctgcctaagctcaccaatgaggagattgaggccaaggctgctgagtatggctttgagtctgaccgccgccgcggcgataccgagaatggcggcgaaaagggctcccctcgcagcacctccagcgatggcaagcaacttttcgaggaggaagagaacgccactaccatctcttgagagctaggctttctgtcaactccgctaagcggttatgtttcaagtttccggcatgacagcgctgtgcgctgacacctatcaacgttatggctgtgctgttccctctgtccaatggacgggtgaacgccagattcgcgttttgcttttatttcttatttctttacatcttataccccttgtttctggtctcttgggtgatcctgtctgcactttgagtgcagtattgctttttgataatgacccccgaaaatggttcggtcgggcatgggaattgttcagcttcatgtacatgcatgggcttttgcatgatactagtctagcggacgaacacatcacatttactcttttcccatgtaaattgtaaaacctgtatcccatggccctgcatatgacaccttgtagcctgccgctctagggttgagtttatagtgactcatgcgggtgctgccttgcatgaggctgatagaccccagagcaaggggaccattcatattccttgcaattaaaaaactataatgacgagtataatctcctcggaaaagagagccaatcaataagccatgcgaaatacatcctgttatagaacccgatgcagccctttatccgcctgtaaatgtcttaaatcccatgttaccaaccactgcatgtaagataaagtagttgagttgatagaagctgactcttttttgcctttctattttttgcctattcttctatccaagacacgtgcaggtgacctcgtgaacaagagagaagccatcggctgataccgcccccaacttttcttttctttcttttcacattcaaatatctctttgatctgatcgctttctttcgtgttgtggtcaaagaatttgacttctgccaacatataatgcgaatacaaaactttgacccccgcttcctcaacctcggggaaacatgagttcaagcctcgaagctaagatcgttgtgctcggcgcacagggtatgttggctgtgaattacccagttctaaatctcataatcactttactaaccttatctcaactaggagttggaaagactgccctcgtggacaggtactgtaaaaacacattcaaccccgccgcggcttcaaccatcggcgcgtcgttcgtgacgaagcgcgtcctcgattccacctccgacacaatagtcagattacagatatgggacacagctggacaggagaggtttcgcagcatgtcgagactttattatagaggagctcaagcagtgctcctgtgctatgatgtcagtgcatccacttccacaccgtttcccctcttcattcatcctgcgattgtatttgttgcctatacataggcaacctacaacgtgatacaacccacataaacatgaatactaacttgcacagatcaccgaccaaaacagcttccaagaaatggccggctggctgcgcgaactccgcaagaacatcacacccaacgacgatggcacagactccctcataatacatgtcgtaggtacaaagtctgaccttgtcgcggacgacccctcctcccgccgcgttcccttcgaacgcacaatcgcctacgtcgctgaacaactctacccatcccaagcctccaccccgccaccaaccgcaacagcaggcatgggcgggctaggctttggaacatctgtttttggaggcagtggctgcagtacatcgaacgctagtgccggccctgcagcacactcgtccactgccctgcagagtccggactcgaaacgcagttcagcattctggggacaggagattgggtgggattgctgtcatgagatcagtgcacgggatggcgagggaattgatgaggttttccgcgttatcacgcgtaagctggttgagcagcgcaaccggcgggatactgagctggctttgtcgattgctggtacgcccttggcgaatggggtcgttgggccctttaatcctggggttgtggagggcacgggcagtttccgccttggtcatggtgataagcggaggagttggatggggttggcacctggtgtcaatgtcgagggcgccggcgaggagcgcgttatgcatgcatcgcgcaacaaggggcgatgttgttgatcattggctaggatggggggttggattgctttttctttttgcatttgagccagcgtcgttttgtgtttgattattcatggatgcatgggttagaatagtgtagttagggcttggattggttgggtggccttgtttttttgtccgctatgcgtgaatgaagatacttttcgtttggtcaataagaaacgatattctacgccacatgcactcatcatgtactttttatatcacttgaatctcgaagcatgggcagtggagacggtggatccgatcgagatgtcccactgagtccactatgtttatctttttataactatgttgtatggacatcctctggcggatgtttctaccatatcaccaatagccaacaagatcatacagttcaatacggcgataaaccggatttgggctcacttacgtcgaaccccctcatctcgcttatatcggagaatttcctctgccattggtcaaagtatcatggggccaatcaaagagagactgtgctttgctatcagaaagaacctgtcgatttcattccagtccatgtctgtgtcacatcttggccaaggaagtatctcttttgtcaactgcatccctttgctgggcatttctggtctcctttcttattccctccaagctttttgttgaatatcaaaaggtcgatctatctctttatcacattcatcttgttccaaagcagacccggtgctcgtattcaacccctcagccccgtatatcctgaatcccacctcatttatcatgtcgggggtggaggtgatcgcggtcgtagcttgtgtggcagccagtaagaccatctcctctcctatcacaataaacgagattaacaagcctgatcggcaaacagtcgtctccgcctacagcgatggagcgattatgtttactgccataaagaagaaataccgcgagcgcaaatccactcagaaactagaacgctcgctcgaaaggtcgctcgaacggtcgctcgaacgcggccatgctgatattaaatctcagttcaaccagtaccgtcaagagcttggctggcgatatgaggaaggtgacgcgatcgcccgagagcagatgaaagatatcatcatcgaactacagggggcgttgctgaggcatctccgcgaggtacaggaccgggggaccactctagatctcatggcgttgcagacagagtccgaccggggccgcattaatactttgcttattttgagccgtttataccagcggctctcgaggccgtcgcctgttccgccgtcttttccgctgcccatcgacccgacctatcgtataatggcttctcatggccatgaatatccccttcatggccaggacagatattcactatcccattcctcggagacggggtacatctccggctatcccgtctcaccagccagtcatttaccaggccagttcctaccggacgtcgtccccgcctccccgacggatatgctggggccatcgagggaatatgaggctatgaatctaggaaatcgcctacatccatcgggccttggatttgctgtgagtagtatgggcgacttgttccatccccgcccaggtcgtacatcgtcgttgccagtgtcatcgcccgagcccatgtacatcccacaacctgtgggatccaacccagagtcaccgtcgatgttggggcggattccgcaagttgatatcagaccagccacgccgcacagacccaaaccgcgaccaagttcgataccccacgatgtcttgtgggggaacccgtgggagcacgaaagcctcacagactcaaccccatcaaattcctccacccgaagcagcaccgacggatcaacccaggcaatccgacccctctggccacccagcgaaacgaacaactacctgggcttctgcaaaggggcgtggaaggtgcacgtgggattacgaggattcaaaatctactcggagcctgcggggtattacacacaacagtcatggttgcggtgcacaaagtgtgctttcgaagcacccatggccccgaagagttctagcagcaacccgcaattcgagaaaagcgtgcgtacacatcaagccagcggtattcggtatcgattcgagttcttggcgaaatcccacgtgccctgtaagcgggacccggcatcagattttacccctaataccccccgcggcacgttttgttgcgtcttttgctgtgcgctggcacaaagctccacacgggtctatgggaaccttgatatcttcatggcgcatctggcggaacagcattggacggttgagaagggagcgttggctgttttgtctagtatgcggtgtgtggtaggtcgagttgcgcctgattcggagtatttcgatgtgaatattgtgccggtgcgcggctgatgtcttggatattattgatcctgttgttttattttggggatgtcttaggtttggactggaagggtgtcttggtcatacccgttctttttgtgtatgtgatgtatagcgtttgaagaatggatttcaggagtgtacatggatagcctgaccaggtacgaagtagtactcggtagatttccagggtctaagtaatctttcacggttgcacagtatgtatatcgtactccgtacccctgaatacgtaaataactcgaaaatcaaaaataaaaccaaaaggaaataaaataaaataaaataaactcaaaagataggccgagatctttcgatttcgccaatcagaacgaccccaatggcccaaaatggcccaaaatggatcaaaccaggaaccgacacagttcggtctgcccaaataaggaaagcgccaccttcccttttctgctttttccctttaccttttttttttcttaccaggtctcttggagaaaggacctcctcctctggattctaacttattcgactaattccatattccttctcgaagtactacttcatcccttgactcggcactttcgtcatctcgcgctcagagtacgcgagtgagtttgataggcctccacatgggtcgacgcttattacgttcctaagattgcgcgttccgacaccttggccttttgccatcttcctcctttcacattcaccccctataccacttccctcgatccccacaatcgcgttatgcgatgaggttgtcacttcgtgttagtgccgctgccgcactaattatcctgactctcgtcctggtctgtcgcaatctgaagaccaaaggcgaatcactccaggatatatggcacttcgataccggctccttccgtacatccctcagaccaaaaccccagcctgatccatcacaacggaaatggcgggttgcatcggacagaaaacccgcgttggtctaccagaccaccgatatcgtggtccccaaccagggtgctattgtgatggccaagcttaaggaggaagacaccgcttgggtcggggcagaactagcagagtgagtgtgactcgattgtattcccagaacaagaccctaactgaatatctccagatggcgcagcgtcatttacaccgtcgacgatatcaatgccccgacgcacaccccgaaaaacaagggtcgcgaggctctcccctacctcaaatatctggtcgaccactacgacgaccttccagacatcgtggtcttcctgcatagccaccgcgacggcctactcgccggctggcacatcgacaccatggattacagcaatgtggactcggtgcgggcattgcagaaagaattcgtgcaacaggcaggctatgtcaatctccgttgccaattgagcccaggatgcccctcggccatccaaccattccgtcaacccccgaatcccgaaagcaaaggcgaggcacactacgctgctgcgtggaaagagctgttccctggggaaccggttcccaaggaagtcgccggcccatgctgctctcagtttgcggtttcccgagagcagattctccagcgccctcatagcgattaccagcgcatgtatgactgggtgatgaacaacgaactgccggacgacgttaccgcggcaattatggagtactcatggcacatcattttcggcaaagatcctgtcttgtaagttatcctgcaattgtattatttgtattttccccgctaacacgtttaattgcagctgtcccgatttgttccaatgctacgcagatgtctacggcgaagaagtcatctttacctaaatactgctcatttctaatcattcttcttttgcctacaagggccgatagctctcttgtatttcaaccaatacgtttcttcattacccggcacttgccggaactccccagcggagaaataccatggttactgggaagacacagtgccaatgccatatgatgacttgcttcgatgtctattttttttattctatcggaagcaaatgtacaaagaccgaaatgtgccgggatggctatcagagtgatatcatctgtctcacctcgagttgcacgtccaactcaagcgcatgagataattcctttcgtgctacggcacccatgtatatcttattgatgcaaattttattccagttcaatcagtaaccgggtacctaccgcgtagctatgcctttttctcctgtacaaccatcttcctcgctacttcatcccaccggtacatccccccactaccgacattataatgataataattatttgtcccgctaggaacaacagcccgccgaaaggtaatgttaatccgtcccttggtcgcctccccggccttccccttccgcttaggaatactatgcaaccaattcgactgcgtcgttccacgcataacaaccatatcccctgacccaaggctcattttaatctgctgcagtggcaccgcagcagcaggcctagacccaggagaagagacggctttcaacgttccacccgaaaccgtacaactcgcccgcgtcgcactagtaccgcccggcccggaaattgcgtgtgcagcaataggcacgcatccacccgtcgtccggtttgcattccctgctggtactgaaggcttaggcttcattagaaaatcccgctcgccgcccagcgacagcgaggcgatatttggctctggtccgaggaagcgctcgtcgtcggagtggaaggcgatactgtcatctccgctggaatagtaatttaccaggcagaaattgtagccgggtgtttcatctgcgtttgcatttacgtttgctgcttcgacctgtctccgtaggagatctagacatgctgggattggccgcggcatgcactggtattttgttttcggggttggcgttttggcctttgtttctagtagaacgaggctgtttgggtcgttgtcttgttcttggatgaaggtcgatgtttcatcgacgccgaagactgttgtccatcgtggtgtgttgatttgcgtttcaatgtcgccgcgtcgtgctgtgtattgcacacggtagaagggaagttcgcgacggaggaatttgaatagctcgtttgctgttgggcgggggatatagggctggaagtggaggaggtcgaggtgtggttgattatttatttcccggggtggctttgctggtgttgcatgtcctaggcctacttcaatgtgggagggaagttgagctattggaattggataacttgggtgttggcttgggggtttggtgtcctcgactgggatattgtctgtctcgggtgttgagattgcagttgcggtgttagattcgatgaggtcggttttcgcacgttttggagcggtggttgatggtttgaagaatgcatcgagcgtgcgttttgccattgtggaatgggaagatcttgggtattggcaattggaattgaggcagttgcgcgcgacttggagaatttctcgggtgatgtcattttcgatcccgatctatgcattccgatctggcttggcacatattttgtagcatcattgtcatggcattctagagtaactccgaatcgctttctcgggctataggctatataactactgctgaactccgtcagtctcggcaatcttgaccaagtatttcaccgcagatgccttgccagcctctagatctttcaatgcgccttcgataccacccagtccaccttttcgcacttcgtatgggtggcctgagaaccaaccctgtgccagacctcgaccaatgaattggaagaaagcagctccgaactccttatcaccaacagtctggccttcggcaggatgcatatgaacagccccgaccatcgtccgctcgatgctaatttgcttcggcaccttatcagcgtccgcaggtaaaacgacagtgatcttcccaggtacatcgagagcagcaccgagagtcacatagcttcccttctcggacacggcatcgtaggcatactgaatgggattacccttgccagcagccttgatcgccgagtagacggcgtcatcgccttcacgataatcaataatcgtgtctcccttctctctgctgatcaacgtctcgacgaagggagcgcctttgccagcgatagcgatgatggggtgaatgttcgatagctgagcgaacttgatagcaaatgcgccaaccgccgaggcaccgccatacacaactagcggaataggtttatcggcgggagcccaaggtagaggcaatttcagtttctgatataggcccaatgcagcagtcatcgccgcgagggggattgtagcagcctctggtcaataagtttagttacatccgcgtgatgactaggacggagacatgtcataccttcaaagctggtcttctcggtgagatggaatgtcgtgtgttcccacgcaatggcatattcggcataacttccatttggggtcatcatctcgtggaacgctgccactttatctcccgcgcggaagttctggactcctgctcccactgcttccacataccctgcaatatcgtctccctggttaatagtattgtttggttgccatttggggactttccagtccttcgggttggtacccgacactactacccggatgaggacctggccgggtttgggagtggggatctcaacgtcgcggatgacgaccgaagtggtgtcgtcaacaatagcttctttcattttgaactttgggaatcgacggtggaaatcaacagatcaaatcaaatagatcaagccgataatttatattcgattgatttgtaatgtcacgggaatatataaatgaacttattcccggcgcttccacggatttataatcagataccttagttttagataactagttgactagttagttagttaggtacatagatatattacctaaatctccttagtctgatattgaggaatagtctcccctgctcgccacttgtatttgcttccagtatgatcttcaggcaaacgttgcgatccaatgaacacctcgcgagccgtggcaccttctttctcaatttcctctcggaacagccctctccgtcttagttcaggcaataagaattcaatgatatcctcgaaagtcccgggattcacaatatgagcaagattgaagccatccacatcggatatttccacccatctttccaactcatctgcaactgtcgtaggactgccaacaaccttggcctgtagtccacccacactgatatactccacgatcctccgtttagtccatggcaagctatccgtgccagggacggtaccagagaatctccgaacaatggactggacccgcggcgagtcgctgaacaggaaatcctcatcatcagaatgacttgacaggtcgattccggtccatccaccgaacaaagcgagcgcaccttcatcgtcggcatattggagatagtcctcgcgctttgcttgtgcttcttcatctgtcgctgcgacaatcacgttgatacccacaatgactttgatatgcttgggatcccggccttgctgtttggcaatattccgtatattacccaccgttaagcgagcaacctcgggagtctgaccaccgatgaagattgcttcaccatgctttccaccgaattgattaccggcctcggacacgccggcctggaacaggaatggcgtacgctgtggcgatggctcacagaaatgagggccaggaacatcaaagtattttcctttgtggtttatctcccgcacaccatcgctggcaatgtataccccgagctgtcggtcggcgagcacggcgtcgtctcggaaacttccttcccagagcttatagagcacctcaagatattcatctgctattgcgtatcgctcgtcgtgaggaatctgctcgttcagtccgtggtttcgggctgcgctgtccagataagatgtgacaatgttccatgccaaacggccttggctgagatggtccacggtagagagtcggcgagcgagggcgtatggtttttcatacgtcacgctggcagtcactccgaaaataaggttctttgtgacagcggacatggcaggaacaagatacaaggggtcattgacgggaaattgtgcgccggatgccaatgcgggcaccacattcctagggcccttgtatacatcgtacgcgcccagcgtatccgcaatgaacattgcatggaaaccggctttgtccagcaattgagctaagtcggtccagaatgagagtgttttgtactgatcggtcttgtttctagggtgcttccatagcccgggtgccaaatggcccggggtgttcatgacgaacgcattgaggatgatctgctttttgccggacgttggtgtgacttcacccattttgagttggaattattcgaacgttcagtggatttgaagaggcacttgaggtctacgcgatgagtctttagcaataggaaccggtttgtatacgtagtgggtagaagcatacgccaagcgctgtcgccatcgcagggtcaccttttatctcccgtaatcggtattcgacatttgtgatgactattttgaatctcatgtcggccgataaattagcctgtgtggggtacgcagtgaccctggttgtgcgcgattccaagtgattttatcgcaatctgggagtcgaggcacgcaatcccaacgacaatccccctcacactcccatatctttcgcaatcaccacatggcgagcttattaactttatttcgttcctccaatggctttgcgtctagactctttagtcgtgtctctaccagtcattctgtatggcgcaattgcgggcaaggacgacgtgagatatctcacccacatggcaactctgattgttgcgcagtccttcagagaacccccaattggctatagatctacagagactaaacttggcattgaggatatggcggaccctccacacaataaatattcctcggccctgcaccttggaacttggctttactatgcccagagatgtctgacatagatacgtccgctttgatcccccagggggcggcctatggcctcctcattggcctcagtgtggtgttttgtgttgttgttttggttgctgtcaagatgcagaaaaagtatctttctgaagattccggaaaatcggaaatgttcatggtcgccaatcgctccgtagggagaggcttgtgtgcatctgcagtcttcagttcctggatgtggatcaacgagacggtgttgtgcgcggctatgacgtatcggtatggtcttgcagtgcctctggtatgtttctttatgccctcaattgactttgcacgactgacgggctatagtggtgggggtctggtctatgcttccaaattgcactgatggcagcactcggtgttatggccaagattcgagtcccttatgctcatacatcgctcgaagtagttcggatgcgctatggcaagattggacatctcgtgtttatcgtgctcaacctcgtcaacaacgttttcggctgcgcctcgatgattatgacgggctctcagctcattcatggtgtatctggaatgcactatgtagctgccactatcctcgttcccctcggaggtttgtttcatctttcttactgaagtccatcgggaaacaggagctaacccctttgtagttgttctctatacagccgtgggcggcttgaaggccacattcctgacggatttcttgcatacggccattgcactcattctgatcatttattttacgatcagtgttttgacaaactcggcgatcggtggtctgggtggtttgtatgataaagttacggcagtagctgcggataattatatccccagcaactatcaaggttcccttcttacattcaagtcgaaggatgcaattatctggggtttaattctcaagtttggaaacctggcacttgtcgttatggtatgtcaattccaaaaagtgatctttgaaagctcccaaggaagacttttcacaatcacgaacttcgccatgttctttccaaagctaacatatcaccggtaggataccgcattttggcaaaagtccttcgcgaccgaggtcaaagcgacagtcccaggatacaatattgccgcattggctgttttcggtatcccctggggtctaggcacagtcgtcggtttggcaacgagggcaattcacaatacaccaatctttccaacataccctggcatcctcactgccactgaagtgagctcgggcatggtgatgccatacaccatcaaagcgctcattggagacaaaggaatcattgcattcttcttccttttgttcatggctttgacaagtaccgtttcctcctcaatgattgctgtcagtagcatcttgtcatatgacatctataagacatatctcaacccgaaagctaccgacaagcaaattgtgggagtgagccacttgactgtcattatccacggcgtctttatcaccggcatttccatcgctctcaactatggaggagcaaacatgacatggatcgggtacctgagacccatcatctcatgtccaggaattatccccatgattctcactttgttctggtctcggcagacccggttagctgcaattgtttctcctgtgcttggcttcgcttcaggtcttgctgtctggttggcagtaacgcactatatgtatggcagtatcaacatcactaccactacaaatccctacccagcactatatgcagccgtcacttccttctttacgccggctctctattccgttgttctgtcactctacaagccttataaattcgactggagagtgttcctgcgaattgagctcgcagatcaagaagaaatccagtcaccttcagacgcgagcacattgaaccggagcagcgaggaagaccacgcaattgatttgaaacatcccgctggatcagtctcaccggttgtcaatagtcagccagagagcatcaacaacgacccagagaagattactggcgacatcagcgaaaaggtttcgacgaacaaaacttcgtctccatcctccgcacaaattagccttgatgatattcggcacccattcgacgacgaaacgttgaaagagctgtacagatggctcaagatcgcttggtacatgttcggggctatcgtgctgatcacgtttgttgcttggcctcttccactgtatcgagactatatcttcacgagatcattctttgcggggtgggtagttgtcgccattatttggcagttcgctgctttcggggcggttgtgattttcccactttatgacgggcggaaggatattgtgatcggcgcgaggggtatctggaagtcttacaaagagcttttcgggaggaacaagaaaaatcaaacgagctaggtagataataggtgctgttaaaatagagcgggaaccagatcggtcttttcaaatagaactcaagtcttcacgacagccttggaacattcttgctttcgtacggatcctcccttgatctcaaagccgtcttccgggagcaccagaatagcccatcctggagcagatgatcctcaacccgagattctctcctacagggccagaaaaccctctgaaagggcctcggattcgtcacttagggtgtggttataactggttcatccgctggggaaggcgctgattacataaaatgtgtccatgtctcgcaaaataggttgcgacttgaaacggggtagtgacaccagcccctgctacaacgatcacctttgagatccttacagagtgcggccttcgtatatttatacgatgcaactacaataaacggtagaaatacgatgcatgcccgcgaggtaaaaagaccaagaaatcgctggtcttaacgtttctcggatgtccaccaacggccctatattcagggaccgggaaatctcaaggggattccaaggggaatagaatgcttaacactggaagcaaaagtggaccctttgtagcaagatgggatttttacagccgcaccgagatgcagaagaagacatggttgaataggaatgttgcccacacaaagtgcatatacaatttgtcagcaacattgaagtcccttgaaaactgtcgtttagttagagagtgacaaagtgaagatcacctaggcatacattgccctaggactgcatatcttcaccaatggggttgtggcgttcttagaggcttaggcggggaggcttaagcagagctacccaatgcactaagccaaatctggtatacaagatgttccttgagcagatgcgattggccaatcttctaatccaagtggagtatccgcaactcttactacaattgtatatcggcatcagggcgcgtggctctgattatcgaaaattaactgcactgcctgatgaagaaaattaggaaaacatcgcgagcggaaatgtatctggaagggttaaatagcagacaagggcccacgattcgagagtaatacaaccatcagttcattttccgtcttcctcttgatcccagtacttcattcccttgtgattatgactatcgattatcggcatgggatttcgatcctagaggtcattgtttactctccatgcctcttcattgctctctggatggcattccaccatggtttcaaaaaaagctccggctggtactttttcaacatcttttgtcttgcccgtgtcattggcgcagcatgctatttggccacgattcgctatccttccaatatcaatctatatattacctgggctgtttgcacttcgcttggactttcaccgttgttattggcttgccttggtcttttatcccgagcgtgagcaaccctcttactcgtgattaacttgatgatttgcagctaacgacatttattagaaatgattccattatgcgaaagaccgccaatcctctccacccgttgatcttccgggttgttgcaacattttcactagtcggtgtgattctgagcattgtcggcacaacccagaattccgatattacccatggccttgttacaatagagtcgaagattggcctcatattctaccttattacctggttctgtgtgttcgggctgttctttctgatcttgaaacgaacggaaagtattgaggatggagaacgtcgcctcctcttggctgtgggaatctccgtccccttgatcctcgtgcgattagtctactcttacatctttgcctttggtggagatgcagacttcaatctgctgtccggaaatgtcacgattcagcttgtgatgtgtgttttagaggaaattctcgttgttcttgtgtgcctgggcatcggccttacacttgaagtacgacccgctgctgaatacacacagcaactcagtacccacagcggagaagaaaatctggtggagctcgagagtggtcacctgccaggccaagcgcgtccaaatagacgagtccaaagacccaagcgtcggggtggacccattacgaaactcgtgatatatattgtggatgaggtcaaggaccggaagcgatgaatgattgcatcgatcaagatcatggggttagaattggggattgggtttgaatggacttgtttactttgacacttataaggtagcatagattgactagctactagaactatttctacgccgtgtagaattataattaatacccttgttatgaagactccctctaattcttttgctcaaaatccatctctctgattgccatgcaattgccaaacttactaattattctcattgtttattgaagatgctgaagatgagaatgtgtgacgtcaaccatcaatgtcacgtaactaagcagcctgaacgtaaacggaaaaacatctcgactctctccacaagccttcgttctccaatggatcacaacacaggtctccccttattcattgcccaggagactctctgcttttatccaatcagtacaatctacaactcatgtccacgatatctcttctatgcgcttctgctagcaacctgtgtcactcgatggacaggatgggtcatggatgtatttttaggaactgcagcggcatatgcatttccagttaccagacaccccaagaccctggacctgtcactatcccatacctgtccgctaactccagcctacaaaacactttctcttctttgatcaccgagacagaccatgttatgatctcgcccgcatcacttgagcttgactcggatgctgttcttgcaatcgttgtcaccggttatctcgtctttttacccctccaatgctggtcccgcatcctaacccacgaccgagcacggaaccttctcttttatatctggcacgcgctcatgttgggtggctctatatgttccctcatctatgccgcgaaagtacccaaaatatccccacagtacatgttctgctttcctgatctcgcgcctttcaatgacacatcgaatgacggatggcaagcctcatggagaacatccacgtggaacgacagtgtgtgggatatattttcgaacctcgcgcgatggaatcaactaggagatatttgcttcaacccctgtttcaattcgacccaaattttacgaaaaccagactcattgcattcagccacggcagacggagacttcaaaattgctacctcccatagcttcgtgaagaaggttctgtactcgcatcgctacatctacagtctcatcattatttgtctgatcctgaactgcctcctcttgacttatcgatttctaccttatcgatcgcggatcccatcagcgcagatcatggtaatctggaaagaacggaagactatctggaaaagcttcaaagacgaagtttgcggtgcgatggatacaccaagcaatctagataataatggagaagacccgggacccacaaccaagaagacctctgtctggcgccgaatgcgacacatattcagccgtcagttcctcaaatcctttcttcatgtgcttgttgatgctgcaattctttttggcatactcttcagcatgatagtcagtccgttcaccgtcgttgcctttgtcatttggatagagatccaaatctccaatgatgggccgtcagaggagactccgagtcaggttggtcagtgggcgtaccccgtgtctctagcactgcttgtaatctcagctgcgattctgaagctcaaataccgactagcttcgtcggttgagcttgaacgtgagatttctgcattgaaagagcacctgggagccttggagaaaatgaaggaggcacgatcggggtctgagtcgactgcgctcacagctatgactcgtccggccaaggaaaactaggcctaacgatattgttcacaaaaaggtgcaatagaagagcttaatcataacaatgaatacattcacataattgatcacgagcttcagtgttgatggtgtctgatttgaaggcctcttgcttagtttacatgtctatccctatttcagactgacagtatcaaacttcctgacaacggtaagcacacctaagtataatgcaaggtcctctgagatcagaattataaaattagaacgaataataaatggcacatgtaagttgggaattgcgttatatggtgacctgtatatcccggctaggcgaaggcaggtatccctgattgattctgtagactgtccctccaatgtattccctggtccaggtacggagaacatgatgttataatagcggggaaacgagttatgtcaaggcgatagtcttctttcccgagatgatcgccttggcagtcctgcgggggacgggggaccgtgtcgcatgaaaataggaagaaaccagccaactatccttgttatgtgttatgcgtcacacagcgcggtcagtgcatgagaaatcccgaaaaataagacattcgattcgagaaacttgtccattggtgttatgaatggactcctatttatgaattgactcctatttaatattccttgctcccccccccctgttaaggttggtatgcgggtttctttgttctaccattctgtagggtcatacggagtacattacgcagatttaagacaaagggatttccaccttgttatccccttgttgtcccccctgtcattactgcccgcacctatacaatatgaatctcaaagagacaatctccaacaaagagttcagtgagaatgtttgtgttgatggcattcattccggcagaaggacatcacacataccactctggcaatcgttcaagaaatcccccaacatcgtgggctattgcctcgcgctaagctcggcaattcttctctatggatatgatcttgtcatagtggggacagtggctgcaatgcctcaattccagtaaatactccatccaaaataatacagaatttcgtcgctgctgacacacgaaagacttgttttcggccaggaactcaatggaaagtatatcatcccctcgatgtggctttccctttggaacgtctccagttgcattggcttgatgttcggctccatcctcggtggttattatcaagatcgtcgtgggcgtcggattacgcttgctataggcaatttcctatccaccattgcggtcgcaatatgctacatctccgatctaccagacgcaataggaagtcgtcgaggggtattcttcgtcggtaaattcttccaggggatttgtattggcattcttctgtgtgttacacagacgtacatgtccgaggtactccctgttgctctacgaggaccggtcattgcattctatccgatcttcacacttcttggacagctggttgggtcgatcgtggtttatacttcgcttaagcatacaggcgcacaatcttaccggatttgctttgcgtcgcaatggccgttctcggccgttccctttgtgctagcggcatttctaccagagtctccaacttggttgttgagaactggacggacagagaaggctcttaaagcacagaaaaagcttgataacgatcatatcgactcacaagctgtaatcgacgagttacaggcgtcaatttcagcagaggacgaggagagcgcaacccatacatatgccgactgtttcaagggagtcaatatgcgccgaactatggttgtggcttttgcaaatatgataccccagatgttcggtttgcagctgttggcaaatgcttcgtattttatgcagatcgtgggtatgggttcatcgaatagcttgatattcttgattttgggtattggactgggcctgatttcgaatgttatcagtctatgggcgctgaatgtctttgggagaagacttcttattctactgactctgggtatcgttatggttctatggtttgccattggaatcgcagggatcttcaagggaacagtgacaatttggtaagaccctatattggacgcttaagacgatgagctgacttggttgcaccaggtatacggcagtaagcatgatggctatcgctatggtctctggttttggatcgtggcctgcgtcccatgtggttgccgccgaagcgtcctcgttacaactccgagccaagagccaaggtatcgggtggtttactagtggcgttggcactgcagtatttgccatcatcttgccgtatatctataactcagatcaaggaaatctcagggcgaaaacggggtttgtgatggcaggattcgccgcagtggcagtcgtcggggcatggctggctatccctgaaatgaaaggtcggacgccaatggagattgatcgcatgttctcgttgaggttacggactcgggcattcaaaagttggcagagcgatgtcacacttaggagcgaaacagaagacactcatccgcccgctaattcatgattgttctttctacgcaattgaaggtggaaccgaaagagaccggttcgacgtggagacaaagtcctattactcaactcgagaaccaaatttatattcgttttatctgtctcagattagaccattacctgagctaaatatatagttggatccaatattcttctggtcgatccctcaatttgacctcgtctgccgggccctgtcagcagtctcgcagccgagattcgaaggggacattttcacatatcaatacaattggacagcctgtcgggataaaatgtaccaaaaagaaatattaaaaaatcagagtacacctattcagatgtttttatttttttcacaaaccacagatacccagcgatgcccaccttccaaggttaaagccccggagatcctaatgtatgactaatctgggatagagtgggcaatgcgagtctaaccatcctttctcacttgtcatatcctcgaaactcatgtcggataccccagagaggaataaatctagcaaacgtggaacacggaattccctttcgtgtgcacaatgtcgctacaaacaccttcgctgtgatggccgtaagcctgtctgctcgcgctgcgccacaaatacagtacagtgcgtttatcctctatcacggcgacgtggaaatccaaaatcggcgaaaccccggtcgcctgtcagagatgtctatgataacaccgtcgagacatcactgcaaacatccactgtctgttcttcctcttctaccgctataaacggggaaattgaatcaacttccaactcagctgcttcatttttgagtttatattatgagttctttcacgcggcccatccttgtgccttaccttttcaagttctcaagactcggctcaacgaagcgaatattcagcctttgcttcgagtgatgtcttatatcggatctatttttgatatttcttgtccgtctcagttgctagaatcttgtgctcaacgtgctcaggactcagtggtcgaaattcggtcatcaatccggcctcttacaccatttgacgttcaagctctgttgctttattctatcgctgtctactggtgcaatgaaacagaaagtggtgtggagctccttgacgaagcaattcgcatggcagtagcccttgggatgaacaaatcggaattcgcccgaaaccacgctgaagctgattctgtacttgaggaaagttggcgacgaacttggtgggtgatttatatcaccgatgcccatattgccggtatgtcccctaaacatgattatttcccccaatttacattcctgataaccgcaggatctacccatacgtacccgttccgaacaagtggcattgaaatcactaccgaccttccttgtgaagaggaacagtatgaaataggggtaggacaactgctctattgctttttagaagtttgagttgactttcattaggtcatccccaccccacgatccctagatgattacgagaacagggaattccttgacgaagaaaaaagtgatttttcctcctatgcggagcttattggcttgacccgcgggattgatcgggccttgtccccgggcaacagtgcatatgaccaaatatacactacaatggctgctagctgcgacactagtgttcgagcatggtgttctcttctttctcctgaaaagagagaattaattcatcccgatggatcatttgatgaggtcatgttcaaagcattcttcattatgcacacgtacgatctgcacctttcttctctgttgtctatttgcctaaccgaagtctagatacaccgttgaaattcatcggccgctgtcagcgttgactcacagtgcgatcgaaaccgtgtcgcgctgtgctccattggccccgtcggcacacctcaaatgcagcaacgcgaaggaacgtgacctgcatactgtcaaatgtacacaggctattaatagcattgatgaactgttgactctgccaactaatatgacaacccattctcctttcatcatttgcatgattgccaatgtgactattgcgcatctttcggcttgcaggttcatcttttctggcgaccggcgagccaaaagccgggagaagattcgtctgacgatgggcactttgaagcgtctaagtgagcactggacactaggcaaacggacctaccgcgagatcgggattatcgcccgagaattgctatctctcacaacggatccctcaattggtttggatgccgttgacctgtcccttccgggtccaacttcacctgcattcccaccattggacacgttgcctgacgccaactttgacatttgtgccttttttgatacggatgctcttggcctaaccgaaacgagttcatttattttacaatagattccatgagggcttaccctccaatgatagccctacagattttgaatcgctgatgtgattatcccgatgctttgacagtgttctatcaatagcttcgatacccagctattctcatttgcggtactcctcgtcaatttggatgagagcccccataccgtctctctcaaatgcttcagtatcgatgatcatggtagcaatgagcgtcgccggctctgtcttgctagcattatcgctgatgcgatgatgacaccccggcgcttcaaaccagcttccgccttcttcgatgattttcataggatcttcgttcattttgttgagaagagtccctttgaggacatacgcgccaacgttcgcgcccccgtgacgatgcgggggagttgacccgttgggcgggaattcgacacgcaggctaacgatagtcttgttcgggatgccgaccagcttgtacgagtaggaaatctcgagcgagggcatcgggcggctgtatgttcaatcaacttccgagtgggaacttggtttggtgctttatttacctggagtcgtaggttggttcctgcatattggaatttgaattttttgatcggaaggatgtctctggttctgatgaagatttactaacccggtggaagttcgtcagtatttatataggagattggtcagatagtatagtctactttccgacgtcacggtaaaggatagactgttcgggtgtccgggagtagctataggctatcaacagatagcctaccgggtaccagaaataaagtacacacgtggttcttcgcacgaaccttggatataccttcatttggcgaatcattctccgtggctattctcgcaagtctcaatttgtgtgctggggataaccgaaatgctggcgccattcccgaccggacaattggtgatatctcacaggttcattatacggtctgcgaaataagcacgcattacgatgcaaagaggcatctttcaatgcttcttacgtgttctgaattgaggaagggccagcaagcactagtaagtgatgatcgttggtcaaggatataatctgcttttgactggagcatacgggtgggttccaacgaagacgacggcatgcgtaaggcctccttttgagcgaagagatttgtcaaagatcgacaacgttggtcgattgctacatgccaaactagaacgtcgcctagtgcgaactagaaaactacaagggtcccctgtccaattcccaattcggcctgtgaaaaataatttcaggggccgcccgtgcattagtcggaggcagccgtcgggtcgaatttctcgacacttcaatattgttttccgggatttggtaaagatgtattgggtttccaaatcccggtctactaatcaggtccctagagccgagtctctcgatgttgtatggtgatccttttggcccttctgaatcccccttcaaacaaagaaatgtacatcacatgaccccttgttcatttgctactctttttcaatcgcatgttttcccttatttcacaaccttggaagacctgattctccgtcaattttattccccaaagtctagtaatgatctctgagaaagagttcttggctcgcctccctcggttcatcagccactggctgggctatcgtgagaatgcaccaaagcctcccccgaaatatctcgttcatttctggtcgttcatagccgcattctgtggtctatgtgtggtacagggtatattcaattactcttcctacttcattgaacgtggcgtgccgggcatcattgcttcttatgtacgtctcgctttttccatgtgcccttgtcagatactgatccataagtagggagcatcagcggttctcgtatatggcgccattgagagccctctagcacaaccacgcgcgctgatcggtggccatttcttgagcgctctggtcggcatctgcatctcgaaactcttcagcttaatgcacaatgaagaaaagttcgactctttgcgctggctggccgcttcgctttcgtctgcggttgccattgttgttatgcaaatcaccgagactacccatcccccggccggcgcgacggctctccttccagcagtggacgaagctgtgtgggcactatcttggtactatctgccagtggtcttactttcatcgactatgattctgatggtcgctttggtcgtgaacaacattcaacgtcgctatcccgttttctggatcagtccacccgccccgaagcctgttcttccacaggctaccaattagaaatacagccatgcgcctttatcacaaggtgactatatagatgtcgagggattgctagggaatgacagtggatattgagacgcaatcccttatgaacaaaggagttgcgcaggaatagacttgccatgtctctttgggtggcaagtgcagtgtcagagttttaggggctcagtatgaccccgtcggatttactatgacctattaaaaagagttgtattcaacatgttgtctatataattaattgtccaaatcacacaatcaaacaagaactgtcacggagtacgtactccgttctccgtaggtttcccgttggttttccgtcggttgtgacactccacaagatcgtcattggcctcgccccgacccgcgttgccgtggcgcacgggttgccaaggcggcccatccatcgatcgccgagggcgggaaccttggaaggtggaaacgcagttcagatctgagatctgtataacgtgcatccatagatatctgtcgccatctgcaacccttatgcaccgtttcagcttcaagggctttatggtcaaatccgatctggctgaaatatgcgtctgttttactcggccgagaacctgaacacaaacacccatgttcacaaatgcgggtaatcacaggccctatgtggagctgagctctagtcgtataatcctttaggtatctacgtacgacataggcagctaggccgagaatactccgtaatataaatgaagctttgcgaatgcgaccccacttatcaaccttagtatagtgtaatattcttaagctatctacgaagtacagtctgttaatggatagtttatatgtatatactctaccatcatataataacgcttgaaaactaagtggtgagatgtatctatgtcggaatatgcatatgcatatgtgaacttgaaaacccggagcaatagcggtaaataaaaaagaccgaagccccgtgtggcaaatttcgtcgctccactaagctttgctggttttttgtctactgcgatcctttgtacaggggtagcctgcataggcccacacttggctccaagctggttctgtggcaagtgggggatggccgtttttctccttccagttcacgtaagggacaatagctgcaacatgacagggtgtatacgaggaatgcgccaatttacaatttgttgttttgcaacttctacatccatggttcaagagtcacggcattgtactttctgtagccaccggtagaattgggaaatgtggctgagtcaggaacacgactactgtttactgtttactgttcactcattatattataggtctacttccatggctaaattctctcagtgtctttgtacatttcatcattatgcaatatcacgccagcctcgcaaatacggtcttggcccgtccgaattcgaatacctagtcggtaatggtctctatattgtcgggatttgaatgattattgcgtcctcgatccatgactcagacattatagatgcaagtgcatgcattggtggaccggagatttcctaaaatacccgtttttagcgatgaggaaaccagcatgatatgcagtaagattttagcttcgggatacaaattggcaggcgatggaatccctcaggaacagccgagagatacatatttctaccccaggtgttatattccatcgttgactcgtgcaatgataatctataatatctatctcagtggtcaatgaagctgaactatctatattgatttcatacgtacccgcgtagcactcaattacaagcgaattgatttagtctgagatagagagcccacattttctgtaacataacggtgatgcacgtcacggtgatccttcttcattccttgtttggacaatcggggggcccgtctgcgagcatctagcctaaatgacgtcctactaagtgatgtatcaatcctttgcgtgcccaatccaggaaggggatataaagtgctcactagattcaagacacttcgtcaagcgagctgtcgatcatgcatatcggacatcagacacgataggtcgtattcatcgttgccaaggaatgtttgcaagatatccactgtgggtagattcagccaagcaaagaatcaacgtggctttgtcgtatccgcttgatatggccatttgagctaattccacccgtcttctcttggtttgaagtaacctcacgcatatggtcctcagtctagaactctccgggcgtccgagaccagccgctctctctcctcttgaaacaggaaaatgtaggcgactgtggggttttggggtgtataaaacgttagttcttccatcgataacttcttgcaacccgggatacatactttgacgagatgtctactatatataacagcaccgaggctccgctcaaccccatgcccatcgattccgcatcgtggcctataggacttgccgctttgaccgaagcaagtacgccagtcctgtggacactcactgcgattgtcggagcttcgcttctcgcctggctcagaaagccctggacagacgaaaatggtcaccaaatccccaagggcccgctagggcttcctatctttggtaaatctaacgctggcatacacaaagggcacgcattaacatgacttacaggttctttttactctttgactagatatcctgagttgactctggactactgggcgaagaagttcggggacctctattctatctggcttggaaaccaactgttcgtcattgtgtctgatccaaacattgccaaagatctcatggttaccaatgggaacgtgttctcttcccgcaaagaaatgtttatcaaaagtcaaactatctttgctggtcgaggcatcactgctactccatacaatgaccgctggtaagtttatcctagacttggctgaagccgctgctgaccctattaaaggcgcaagcaccgccgtattgcggccacatggttgagccagcgtgccgttgactcgtactctgctgtcttagatcgcgagtcgctctccttggtaaaagcattgctcgttgaaagcaaaggaggcttggcccccgtcaaccctcaagtgtgtcaatcccgttcctcaatccccccagcaattactgatttgtgaagcctcatgccggtcgttgttctctaaataacatgactactatcactttcggtttccgagccgacagcatccatcacccgctggtgggacgggccttgaagctcagccgtgaatttatgtatgcgcgcggtcagatatttattcatcttgacaacagactgactaagttactaggaattgcactggccctatgtcgaaccttattgattttgttcctattctgcagtatctcccgtccccattgtacaaacgcgccaagaaactgcacgaaggcttggtcgaaacatacggtggctttatcaaggaaaccgagcagaagatgaaggaaggcaagaaggttccggactgtttagctaagactatggttgaagtccgtctcaaagaggaccttgatgatttggatatggcaatccttgcatcggccttcatgattggcggtgttgagacggtaagttactaccatcatatcactattactatccatcactgacgcctcattcagaccgccgctattatgcaatggttctctgctcttattcctgcctaccctgagatccagaagaaggcccaggaagaactcgatcgtgttgttggccgtaaccgtctccctggcattgaagatgaaaagaatctgccgtattgtcacgctatcatcaaggaagtcgagagagttcataatcctttctggttaggtactccccacgttgccagtgaggattttgtctaccaaggaaagttcattcctaaggatactgtggtcgttctcaacacatggactatgcactatgatccggcccgtcattcttcccccgaaaaattcgatgtatgtcacccatggccagccctttgaaagacctgtttactaataagcgaaaaaaagcccgatcgttatatagacgaccccttgacatctgccgacagtgtcaatgtcgctgatcctatgaagcgagaccactggatgtttggagctgggtaagtactaccttgtatacgacaaaacacaaagcccaactaataccttctagtcgtcgcatttgccctggaatgattgtggctgagcgtgagatttggctgacaatctcccgtatgctgtgggcattcgatatgtacgagattccaggggagcctgtcgatttgaaagaatacgatggcctctctggacgctctccactgccgttccgtatcggattgaagccacgacatgaaaatgttacgaagctactagagaaagttgagatttaaattatgtgtggcaggcaggatgagtgattaagagactgaagatgactgggatggcgttctcccacgatgagaatgcagatatgtatggaagatcatgaattcagtaccttttttctcttgatatatatacctatacgtaccggattttccctggcgggtggggctttcctatttgagctgccgccgcttttgtgagggtgcttaggctcaggctcactgagtagatatcagcacgggctcagatcagtgatcatgctcagattcatcacgtgcagatgactgatcctcagtatatgctcagtgagtgctcagtgatgctcagtgtccaatcagtgagcaacactgatgccctcagcacgccgcagcacaccgcaggctataccaaaaagggattagccccgcaggtagtttatactgtaatagctaggtctttgataacattgctgctgccctcattttttggagcactacatcccaccaaggaaatacgccatgacaaaggggcgcaggaaagagcggagaactccgtccgtttcaggatattatcgccctctgtcttttaagtgagagcggctcgagcccaaagtcttggatataaaagcaggccgtataccaacattagtatataatttttcacaagccttctatttaagaacctcttacctagtatccttgatatactatccttactttgaatacattctctgcctccaggacacaccgtacttaatcataggtagaaaagacttttttgccaagcgcgatgagattgctaagacaaaacgccgtttacagcgagaaaagaatggctatattcctagagccccacagacaggaggacttaattcgggagaaggacaagaggcttccaagaccaaaagtttacatcataaaactgtaaagctttggctgaagtgagttgggctgcatataaggtggcaattccttcccattcatgaataaggctgaccttcccttagttttactgcagatccagagaatgggtttgaatactacaaaacttcccttggttgtccagctccaagtcatgacatgatcaagcaattcattcgctggtacactagttctattcaaggacgactgaacgaggatgagctacccacggtgagaaccgtgagtgcgcatgccgaacggttttttggtgggtttgaacaattcacaaaatttaaaatcattctagatgaaaggaaataagaacggttaattaattcgtcacttaccgtctgatattatcataagccattctaacctcgaagtagtggataaaaaataccttgacggcagacggcatcgttatagaccaaaagaaagagaagctcaacttcacaaagcaggattttctgataacagtctcgtctttgtggcagacagatcaccaaaaattcattcctggtttgcttaaggtctttgtcttgttcgctcttcagctgtacctcttcactggggcaagagtcggatcttttatacaatatctttgagaacggactctatatgaaaacgggaagcagtatgacttatcgatgtaatatatttgggattctctacctctctgaggtcagctcataaaatgactagttagacggattttgtggtctagtaacagcttgggcaaaaaaatttgctaggaaccctacagtatttcttggtaaatcattacgccacatcatataattgcgcccagtcacaatcagatagccaatagaatatagagaagcgactcaatcggcacagggtttctgcatataggaaaaaccgtggcctgtcgtaggaaaccactcgcctggagaaacgagctgtcttgggatatagaaaaccgtctgtcgtaggaaatcgtccatctggcgaaactaattgtcgtaggatacggaaaactgtggcctgtcgcaggaaccacttatccagagagggcaattatccagggatactgaaaggattgggaaactgtgggccatcccatgatcacctagctagttgggcacttggaaaattgtgctgtgtccatcgggagtcctgctattgcttgagttggaagtcagcgtgcatgtgaaaaagggttggcccgcatcatcgtcaatcgcgcgcgcgtagagaactccaatgattggtcagtgcctttgctcttagtatgtgagtcatcagaggagccttgtagttacatgagcgccatcaataggtctcaccataagcttttttgaccaccacgaaattcgacagggttagaagatcaccagacatgtttaacgttgactgaggaattccttgattttttccaggtaaagtaggcggaacatgtgtagcaattacacatagatcttacatactatgttgaccgatctatgtgttggatgaacttgagttacacccgtgggaagtcctcacatgtgtacttgcatgatcaaaagtttattgattaagaggcagtaaatatgggctgctttcttatacgttatgggaaaatagtctgatttgtggtaacttgtaggtactttaaacgcgtgcggttgcgataacgaagttgatccacgggtcgagcgcctaggatatgtgtggtaaattgcaggatctgcttttgagttagccacacctgttgtataatcagcacgaagagcttcactcacatcaaacacccggttatctcgatgaccatgctctggacagtcgtctcggtcaaacatccggtcgagttcaaggatctacgaaatttcatccccgacctagtagagatgtactatcttggttagcataacaacgcatagcatctggaacaaggaaaccgtactaaaatccttcagtttaacttgccacaccacttctagccgccgcactgcgttcctccggcttcagctttcttaaacgagatgccgtataaacggcagagcgtggaggagtctaataccttctagtacaaaagtgacggttccgtactggcctaagggaggcgagtgtccgtagggacctagcatgcatactggaaagtgcattattgcatacgcacgatccgcagcttgtacaattcttttcgtcatgcctagccgaggccgggtgactattcgtaccacgcgggttgtccgtgcttctagtgtagtttgcaccgtgtccaccgaagctatatagaaattcttataggaagctataagcatgctctgaatccctagtgtggtgcctagagttgtatatactgcctcggccgagccacctactccaccggcactgcaatatcgctataagagccggttcgaagaccgcgcgagggcctattgggaggtgatacgccacgacctgtggtgccacatggtatgcagacacgtcccggcatcctaggcaaatccagcgtaaatacctctaagtagtacctagtagtacctagcggtaggaagacccccggtcgattaaatgatagaatagagcgccggttgcaattgaggtaaggatatagtagactttgaggccgagttagggccaccgtcgaagaatcgtagcgagcgtctaaggtaagatcgagatgagactatatccggcctatgcaatgtgagcctcttcaaatcagatataccgcggggaatataggagcgctgccttttcggcccgtttcacatactaggagtggaatgataagggaagttctaagggtactatgtcgagcaactatgcccacgacagacctataaaccatgcaatgcagtatgtaaatacggcctagctaccgatgggtctactagaaggtgcctcgttcgacacggtagacgtgggctagaagatcgaggctaaatccggagtagaggggaacaagatgtgtgactactaagcatcccgctcgcttctgcacgtccgcctagttctgggtatgaaggctgattgtaatgatgttggcaatcactggggttgtaagcactcccccttgcacgtatgccgtgatatctagccactggagcacggttggcgttggcgcctagaagaagcgtctccacgatactacgtgatgcagtcggaagggtaagtggccgaatcggtggccgaagctgtagtagaccaagcatatcattgcgaggagcccacaaagaccaaatttgtctggggtggaagccctagcaagccatttgacaaaatttgacgcaggatgagacatgctttcaggtgaggcaatcctcggcattgtaggattatagtatattttccgaaaggctgaccggaaaacgctgatctagagcttttattttgggcggtcgaaagcactttgatgttgatgctgttcagatcagagacctctttcatggctcatactagagatgaccggttgacaattgcaaacaattgagtcctcagcaggacatcaacgacagcagtaaagaaatcatctcggtgttcagagccaaatggcgaaatataagaaaccacaagtccacgcgaacaactttacggcctgtggaactacattgtttcgtaaccgtacacatacttgatagagagttgggtcgtaggtagtacttaaatatccatggatattgagatcatatagctcgaaggttccacgttgatatcaagatcaaacttggaggattatgacttctatatccccccccccnnnnnnnnnnnnnnnnnnnnnnnnnnnnnnnnnnnnnnnnnnnnnnnnnnnnnnnnnnnnnnnnnnnnnnnnnnnnnnnnnnnnnnnnnnnnnnnnnnnnnnnnnnnnnnnnnnnnnnnnnnnnnnnnnnnnnnnnnnnnnnnnnnnnnnnnnnnnnnnnnnnnnnnnnnnnnnnnnnnnnnnnnnnnnnnnnnnnnnnnnnnnnnnnnnnnnnnnnnnntacccccccccccccccccccaaatatttctcaaaacatcccattaaccctatccccagtctctaaaagaccccttaaggcttctcctccccaatcatcgcaaaccacctagccatataatcaatccccggtttctgatccctcggattccgcggctccggttcaaggaaaccgccatccggaagggggatttttttctttcgagcgatattactcaatccaatagaatatatacgccacccatcccagataacccaaccgagtcgtcgccacggttttatgttcgtcagcgagtagcatgcaggcacggtccgcgtgagatttataccactgagatagaggtgtgcgacgtgccagtgatgcgaggcacggtgtctcggcgcgagcatccaggcggatgttaattctgtgtcctcgggaggatctggcgtagcccagaggctgctatcttgtgactgtgtgggtggcaggtcaaatgatgggaagaaaggtattgatgtttcttccggagcgggccagatggtttgagcaggttcttctgcttctgggtcattaggcagccagttcagggtcagacccagatctgagaggacggcggatactgtccagagtctttcggctgtgcgatagtcgatttcgctccaggtgttgtatgcgtctagttcccggattgaggattcgttccagttccatcgctgggttgctgctttgcgtaggtgggagtagtgatgcagatgccagagagcccagtatgtgcgatactcttctgtccaggtgaagggttggccggcattttggatttggagtggaggtccacttattgaatccgcggggatattatcaagagttttgatgagaccttctcgcataatagagagacatttgcacgcaagccgctggatctgcgcgcctatcttaagtatatgccgtgattctgtgcaccctgaagttggcggatcctcgcatgtctggtgatagtgctcaagatccgggcattgcagtgaagagatactgaggcgcccgatattatagcatagcttttgtatttctggcatacaagtaatcggatttaagaggatcagctcttgtatgatgcgggtaggctgggcctggaagacggcattgagtcgtcgagatgccaacaggctgttttcaatgcctgcaaaatcaccgatattggcgagaatctgttgaatgacttcggggggcagtttctcgaaagaatccatgttgtaacttctttgagtggtgagagagatatgtagaaggttagattctctacaacgatcgagatctagtcaaatagctaggtgaagcctggcaaaccaggcaacggcatgtgatcggcacgtggccaccacaacaatatctatacgaaaacaatccaagtttataaatcgaaatttcgaccagacaaggtttagtgccgggaagcttaattgtatgatcttgctccttcctcccctcgactcttctctttcttttcctcatcccgccaagtggtgagagagatatgtagaaggttttattctctacaacgatcgagatctagtcaaatagctaggtgaagcctggcaaaccaggcaacggcatgtgatcggcacgtggccaccacaacataactgaagaaacttcgggctgggaaaggtagatgagaaggggggagcttggagatattgaagggttgcacgtgatgggattagcgtgtcgcattttattgatacagcgttcctaatgcttaacgaagacaaccaaattctacttttatagttgggatatatataaagcgcaaaatttacatcgttcaaaaaactcgagttcaatttgcgaactagatagactgctttcactctctcaaattaatgagcgagctatacgcataggagcagctttgaaccaagcaccccaagtagcatactcgactcttggtggaagatccacatcgagagcagagtcccttatgaagctgtggacgtccatcttttcaatcgggatgaaccagcctccacggtcgagcctgggatctttattccacttggtgtaaagaagccagacgacgaaaagtagaatcacaagcggtgcagcaatgtagttcatgaagaatgtttcagcatcctttgaagccacagagacataaaattccgcgatgagacacaagatattgagacccagaccgatatagctcccaaccacaccaaggggagcggcataggcaagctcgttcacgctgtgtccgttatgcgcccaggcggagcggaagcggatatgggcaaggcagatacttccccagatgaagaagtcggagataccagacaaggcaagaagccagtcgaaaatggtgcttcctgatggcgcctcgttgatgaaagcgagcaaaccaaaagcaatctgcaggataatacagtaaaggggccgaccacctttgtcaatatatgccatgaatctcggtgccatgcctcgggaagccaaagactggatagtacggcttgagccatatgtcgcggagttcgccacgctgataactgaaatagtgatgatcgcattcataacagagggcaatccagagataccggcattctggattgatacgacaaatggagaagccttggtgttggcgccagatgctccgagaagccagtcggcgtcagaaggaacaatcaggccaactataaaggtgcccaggacatagaagatcataatgcgccagaagacctgcttggatgccttggggatggacttggcggggtttgccgcctctgcagcagcaaggccagccatttctgtaccaccgaaggcgaaggctgctgtcacaaagaccgaacagaaccctctgaatgttgtgaatgcaccagggtcatgccagtaatgagctcctatgtaacctccgttcggggcgccaccgcaatcgatcacaattccaaggatgatgaagccaatcacagcaatgaccttgatcattcccagcacgaattcgactataggccgacgttagtatttatatatcttgtaaagatataaatgctttttcaccttctccgtagcctcgaactccgaagaactggatcgcagttagaacgactagaaacactgccacccagattccgctgttcaaagtttcactccagtactgaattgtcaaacttgcggccgtaagttcgaagggaagaatgatgagccatccaatagcgtagtcccagccgactgcgaatcccctatcataaaatgaggagtcagtcttttgaccatgaatatagtacatgaacacggaaactcaccaggccgggctaatgaaccggacgcagtatgtgaaaaaggctccgttcacgggatatagcacggccaattcgcccaaggcctgaattgtaagaagaagcattcctccaacgatcaagtagcatagtaacaaagacccaggcccacccgtacggagagcagaccccgtactaacgaaaagaccagctccaatagcgccaccttactgaaattagcatcagaagaaaagtaaaaaccgttcgaggacgcataccaacagcgatcatctgcatatggcggttcttcaggttccgcttcagcgggttgagttcaccgacgctaacatcatcgtgagctgaagggagactttcagctggttccacaatggtgggtgctttcttctcgacgtctgagtccatggcggtcatgttttcgaattttacgccaacgccggcaacaaaacttatccacggcgagtggcaatttatataaaagcccagccgcagataaccgtctgatttgcatcccgcctatgataagaaaggcagtaagcctgatttgctcagctcgtggcgtagtagagagttcgtatacggagtagatgtgatcagactgcaagatgaagataagactttgtgtacttctcacgacccgttgatatggccaatcgtggccaatcaggaggagagcccagagttcttgtttgagcttagttgacacgctgctcttggcaacatgatcttccccctattttgcggggccaattcgttctctcaatggtcctcgcctgaaaatacggagaagctcatctgttttaggaactcggggtaaacttagttggacaccaattctaagaccccagataagcccactttgactttcaaacatgggggtgaggtaggtctagggttgcagtgtcgaaccccatttccaacctcacatgccggtgttcagctagaagatagtatagagcatagagaaatccgcatctaacagatatttgaaatatgctttcaactgaagtgaatccgatcagatgcgcatttcgcgcgccattctcacgccatgaggcgtgcccgaagaggaatctttttcctgccgttggctggaatctcccacgtcaatactacgctgtggtgaacggtttacccttatcatccgccaatatactttcgaggaaaggaagagatacacatcacatacgcgttaaattgcccgggcgctgacgattggcggtgcctcctatctcaggggcaatgaaacgccgacagcctgtagaactgcaaatacccgatatggtacctccgaggttgtctcagtgttcgtgggatagatggccatagtaaccaacatcctaaggagacatttctattgaaagatatcatttcatgtgcgatcaatgtatcaaacaattgccaaaaatatcaagtccaaaagctcgcagaaaaccttcctgaaacagacgagccctgtctctaaccgaagtgcggcaagggcgtgatgttctacctatcccagtgcaagccacggagatggccacggttgccttcaatcgacactcgcaattactcacgcaacatgatctgcaatgttatactccgtcaccgcgcgaatttgattacttatgaaactaggaaacagacctgtggcaggtgctagtcaataccactgctagaagaaagctctcaccattatttcaatcacagcatacagaatactctttgaatatgcccatttcgagcttgctgttctgtatcttgccttgacgcgcggcttctgccttgatcacattcttctgggccttcgacgctaccttgtcccggtgtacatcatctatacgaaggtaatgagccaagaacaatacaaaagcttcaccatcctccaatgcttgagaagaaaattgaccggagcttgaaggaagcgcatgtgctgcatttctaatgagtacaacgccatcttgctcccacgttggaagaggtaaagtccatattggatacatgctttcaacatgaagaaattgaataatctttgccaacaggtttctttcaaacagcatttctcacgcagttgacaaatcacatcaaccattgcgagtgtttcgagatcaggacattcttcgacctcgtaggttgaccaatcaaggggatcctggctgagagacgtgatagcagcagacatcgagctttctgaaaagaagtatccgaagaacccgttcccaccaaagacaaaatacatggaccccggttcgacaacttcatttacacctgccgcagggatgaagcccccaatcccgacgaggcctctgtcgacatttagtcacggaaacacacataatatggtgaatgactggatcaagtgttttaattttctacttactcgtagttcgggggatatgggtactccgtggtggatcatctattagatatctgatgcatttgggtatctctaaaagtgttggttgtccgcatgaagcttgacagacccctctttggtaagctctttaccctcctgcagagacgcggtttggcagatctctgtttgcttatcttacagggatgcttctcccgcgttccagcgcaggaattctttgtatcattgatgtatttgggtgtccactgttcctatgtagtgttctagacccctctttggcagtatccttgctcttctcgcagcctcatgttgtttcacttgcggcttcatgctgcgccgtgttgtgttagtatcttcttctagtcgagctgttgctcatcttgctgaagatgcttctcctggtttctagggggggtttagggggtggtccacgaaattattcaaagagcttcatgtcagtagctagatgaccatctccgtctatctacacagatttctcttctttgttcgtaactctctcactttctttctcattgtcacattgtctgtatatgtgcatcattttttgtccttgtaaagtttagagggttttatggcagtagctagatcatgatcaacattttatctcagacagatctcgcattggttgatcatcactccccactcttcctatcagaagaccgaaatctgaagcagaataacgcagcagctgcgatatcttcacagtgcttcggacaggtttggtggggtacgttgactcttctcataacgactatgaagatgggaagtcaaccgaagcgtacaagcgtcattcgatatagatccttacctatttgggcctggccttgcccaattgtagagctagaaacaccactcgtcgtgcttctaaagtcttggactcggctatatgtacttgatcgcgatcttacctttcctccttcatgaaacactcctagttaataataaaatcctcccaatgtctatggcaaaagactttacagaagaacaggacagccaaagaaatcttcctaattgagagaacttggtgcaaatatataggcactggaaaatgagagcaaatacaatagcagcaaaaaaatgcatcgtttcagcgtctgattacacgagtaattaaatccaagaatgcggagtcataatcgaatacaccatgtatatcccggttcacatcacaacacagcaagagttttgcttcttggcctggaattacttgtgttagtacattcaagtgaaagctacccttgacccttgatttgcatacctgggtatagaatttcttgctctgatttgacagatcgtcactcttctgaaccagggtgtcgatcttctcaccgcgctccaggacactttcgatctggatatggttagcacatataatgggctcatacagacctaagagcataccgtcttgtgaaggacaatcttggtttcgtcaagctcctgctggatcttcatgatgctgtcggcctgggttgggtcctggtacttgacgatatattccttgagctgcggcagggggcacgcattctcgcgcaaagatgggtcggagaaggcagtgcgtgggtacttggcaagaaactcgtccacaatcttgctcaaaacctggtgggccaccagggcaggatagtccccatctgttacaataacaccggcaacaccctctgtccgtccgtaagtatggaatgtgtaggccttctcctcaatatcctgtcgttggcccggctttgtcctctcggcgaccgttcgggtgaagagcatgaggaattcatcgtagctattaagcgtttcgcggttagtgacctagctgtgtcggaccaagagaggatgggtggatatacctctgacgagtaaagcgcgaaaagctagtgacaattagcgggttgttccagtcagttgcagggcgggcatatgaaattacccgttgaggtccttttccccgcatagctcgacagctggcttagggtcgttccggaaaacctgcgaggttgataaataagtaccgtatctcagctaatattcaatcaaatccaagctgtgataaaacatacgcccatataaagaatcttcatggtgacagggtgttgtccgcacagggacaaggaggcaagtaggtgttggggtcagtggggcgttgcgtggtggtaggtgattatcaaggaaacactctagtgtcaaagaactaggcaactcctttatattgtgggagatcagctgtatgttcagctggagtggcgaagcaaagtgacaagtgttaggcctaaaatagactcctgagttgcagataacaatgatgcactggaccctctggattatggcctgaggcatgtaaggtacaccgctcttgtcatgcgaccaattgatgttgagagcctgcgggcctggccgataaccactttgggttccctacaatattgtacattctttgtcgctcagcataactatcacatcttgatcattacatcaactagacagccctctcctaaacatggacagcatcgcagctaccgagtcacaatggctgttacaactagcagccatgcgccaggccattgccgatctgaagctccccaaggaccttcctcatgaagcgatcggctatggaagtgatattgatctggatattgacgacgactactcatccccgggaacaaatgatgatgtgtgggatatcatcagctcggatgatgaatcttccgatgacctggatggactcgacggacttcatgtcgcaccaggatcctcctacaatcgattctggcttgaagataagtgccaggatttggctatgcggaactcaactatggatgcgacggagcttgctgggcaagtcatcgccaccctggctgctgacagcaacgacgaagagctacaaatgtccttggccgagattgtgggattcgatgacctggatctggtgattgagctgattgcacacagaggagaaattctgtcggacaagggaccctgcttggaatcccagacagatgggctcatggcaggtagactccaaacacgagcagagagagaacatgctctgcagcagcgcgacttcgaacataagaatgcagcgttgatgccggcccaaacccgatcggagccttcctacccgcatgttttcaaacaacacacctctggaaatacactttccgccaatggaaagaaatatgggctgcctctgggtagtgagcagattgaggaaccaaagtacaccgaattcgcgattccagcgtcgaaggtcggaacacttggaaaaggaaggaaactggtggaaatctctgaaatggatggcctttgtcggggtaccttcaagggctacaaagccctcaatcgtatgcaaagcttgctctacgatgttgcatacaaaaccaacgaaaatatgctcatttgcgcgccgactggtgcgggtaaaacggatgccgccatgttgactgttctcaacgccgtgggaaagaacacatctcctaatccgttagaaaacccagaagcgactgagttcactgtccaacttgacgactttaagattgtctatgttgctcccatgaaggctttggctgctgaggtgacggagaaactcggaaaacgtttagcctggttgggggtcaaggtccgcgaactgactggtgatatgcagttgaccaagcgggagatcgttgatacccagatcatcgttactacccctgagaaatgggatgtcgtaacgcggaaaagcactggagatacagagcttgttcaaaaggtccgccttctcattattgatgaagtccacatgttgcacgatgagcgaggagcggtcatcgagtccttggtcgctcgaacccaacgtcaggtcgaaagcacacagtctctgattcgtattgttggtctatcggctacccttccgaactatactgatgtggcggatttcttgaaagtaaacaaaatggccggcatgttcttctttgatcaatcattccggcccgtaccccttgagcaacacttcatcggtgttaaagggaagcccggctccaaacaatctcgtgacaacattgactccgtcgcctatgagaaggttcgcgacatgatggagcgaggccaccaagtcatggttttcgtccactcacgcaaagataccgtaatgactgccaggatgcttatgcagctagccgcggaggagggtcgagaggatttattcagctgtcatgatcacgaaaactattcgaatgcccttcgtgatatgaagcatgcccgtgcgcgtgaactgcgcgaccttttcgctagcggatttggaacccatcatgctggaatgactcgaagcgaccgcaatctgatggagcgaatgtttacagaaggtctaatcaaggtgctgtgctgtactgctaccttggcgtggggtgttaacctccccgcagccgcagttgttatcaaaggtactcagttgtataacccccaagagggtaaattcattgacctgagcattctcgatgtcatgcaaatctttggtcgtgcaggtcgtccacaatttcaggacaccggtattggatttatctgtactactcatgacaagttgactcactacctgtctgcggtgactgcgcagcagcccattgagtcgcggttttctggtcgacttgtggataacttgaatgccgaaatctcacttggaacagtcacatctgtttcagaggctgtgcaatggcttggctactcgtatctctatgttcgcatgaaacgtgagccgagaaactacggaatcgagtttgccgagttgcgcgatgatccaatgcttgtccaaaggcgtaggcagttgatcttgcaagcagcacgagtgctacaaaagagtcagatgatcatcttcaacgacaagaccgaagatctcaaagccaaggatgttggtcgtatcgcgagtcaatattatgtattacaaaccagtgtcgagattttcaacgacatgatgcgcccccgatccggtgaggcagatgtactcaagatgatcagtatgagtggagaattcgacaacatccaatccagagacagcgagtcgaaagagcttcagcgactgcgcgaagaagttgcgcagactgaagttgccggaggaaatgacacgccacacgcaaagacaaatctcttgttgcaagcttatatctctcgcgccaaaattgaggactttgctttagcatccgatactgggtatgttgcgcaaaatgcggcacgtatctgccgtgctctcttcatgatcgcgttgaatcgtcgctggggctatcaatgccaggttttattgtctctttgcaagtccattgagaaacaaatatggccctttgatcaccctttccggcagttcgacttgcctcagccgatcctacgtaacctcgacgaaaagcttccgactacttccatcgagtccatgaaagaaatggagcctgcggagattggtcagcttgttaataaccaccgcatgggcaacacattggccaagctcttggacaatttcccgactctgagcgtcgagactgagattgcgccgctcaatcgcgatgtgcttcgtattcgcctttccatctaccctgagttcacctggaatgaccgtcaccatggagcatccgaatccttctgggtctgggtcgagaactcggaaacatcagaaatctatcatcacgagtacttcatcctaagtcggaagaagctttatgctgaccatgagcttaacttcactattccgctgtctgatccccttcccagccaaatttacattcgtgtaatctccgaccgctggctgggtgccgaaaccgttagcccggtttctttccagcacctcattcgcccggacactgaaagtgtgtatactgatctactcaatctccagccacttcctatatctgctctcaagaatcccattcttgaggaagtgtatggacaacgattccaattcttcaaccctatgcaaacacagatcttccatctcctttaccacacaccagccaacgttctccttggttccccaactggcagtggaaagactattgcagccgagctcgcaatgtggtgggctttccgtgagaagcctggctccaaggttgtctacattgcacccatgaaggccttggtccgtgaacgagttcaagattggcgtaagcgtctcactaggcagatgggcttgaagcttgttgagttgaccggtgacaatacgcctgatacacgtaccattcgagatgcggatattattgtcaccacgcctgagaaatgggacggtatatcacgtagttggcagacccgtgactacgtcaggaaagtcagcctcgtgattattgatgagattcacttgctcggtggtgatcgtggtcccattttggaaatcattgtttcccgaatgaactatatcgcttctcaatccaaaggatccgttcgactgatgggcatgtccaccgcctgtgccaatgcttcggatctagccaactggcttggtgtcaaagaaggactgtataactttcgccattcagttcgcccagtccccctcgagattttcatcgatgggttccctgaacagcgtggtttctgtcccttgatgcagtcaatgaatcgcccaaccttcctcgcgatcaagaaccattctccagataagccagtcattgtcttcgttgcttctcgacgacaaactcgtttgactgctaaggatttgattaactactgtggtatggaggacaatcctcgtcgattcgtacgaatgtctgaagatgatctggagttgaatctcgcgcgagtgaaagatgatgctctaaaagaagccctcaactttggtattggtctgcatcatgctggtttggttgaatctgatcgtcagctagcagaagaactctttgccaacaacaagatccaagttctggtggcgaccagtactcttgcgtggggtgttaaccttccagcgcatcttgtggtggtcaaaggcacacagttcttcgacgctaaaatcgaaggttatcgggatatggacttgaccgacgttctgcaaatgctcggtcgtgccggtcggccgcagtttgacacatccggtattgcacgcatcttcacgcaggactcaaagaaggctttctacaagcacttcctccacaccggtttccccgttgagtcgacacttcacaaggtcctcgataaccatcttggcgctgaggtatctgctggaactattggaacgcaacaagatgcactggactacttgacctggacattcttcttccgtcgattgcacaagaacccgtcatattacggtctcgagatctctgcagaggaacaaaacaccatggcagctcaagccacagctcaagatttcatggttgaattggttgcaaagtcgctcaatgatctcgcagaatcgtcctgtgttctcgtggactcggccaccggagaggtcgattccactcccttcggcaagatcatgagttactactacctgtcacataagacgatccggtacctcgtgtcccatgccaagcgtgatccgactttccaggatgtcttgagctggatgtgctctgccaccgaattcgatgagctgcctgtcagacacaatgaagatctgatcaacgctgagttggccgagaacttgccgctttctattgactgcatgggcgacgcgcccctatgggatccacacaccaaggccttcctcctcctgcaggcctacatgtcacggatcgatcttcccatcactgattatgttggcgatcagacatctgtgctcgatcaaggtattcgtgtcatccaggcctcaatcgatgtcatggctgagctcgggtatcttcctgcgtgtcagatgctcatgaccctcctacaatgcatcaagtcggcgcgctggcctgaagaccacccattgtcgattctgccaggcattccgaccgagaagccacctagtggtctcccgggaactcttgtatcgctctcgtcacagcctgttggtgcagtcgccgctctggtgaagaaattaaatcttccatttaacttcactcgcattacgtctcagctgcctcatctgtcggtcgccattgcaaatgtttctgctaagggcatggctgtgtctttgacacggcgtaaccagcccacaaccccagaatgcaaggtctacgctcctcgattccccaaaccacaaactgagggcttcttcttgattgtctgcagtgctcttcccaatgggatggatggtgaattacttggcctgaagcgtgtttcttggccaccagtgtctaagcgcaatggaaacggcaaggacaagggcaaccatggtgctagttccagtcgcgcaggagctgccaaagataacaaggttgacgtgttgaccgttcgctcaaatattaaattccccgaaggcatcctcgcggattccacgagtacgagcacagctcgggtgaatatcagagtcatcagtgactcgtacgttgggatggcatggactgtttccaatatcgaagttaatttggatactggcatcaatacgcagactgtggcagaggccagcattccaacgaaggactaaaataagatgctcaaactgtttattaccatacgacaagtcaatgcatttgcgaaaggtactggactaaatgtaaaacaccgacaatgaataacatgagcctttcaaggaatggattgagatgttgtagaaagtatcaagaccatatttggagaatagagaacgataggtacatgtagacaacgtatgagaggcggcaaaggggaatcacttatagaagaaaaaaagtaaagaaagagggggggcgaagaatgtcacagacactctatctgcaactcctgcgagacaccagcccgatgtccccggtgagcatctgtaatctgcggtgtcagaggtcttctctgcacaacccgctcctccggggttaaatgatcgatcctcatgccgatgggaaccagaacctgctgctttgctcgtgagacagagacagtgcgtgctatggagacctcaacccttgggataggacgtcggggctcgggtgcaggcgcctgttcagcggtatcaggtgtctcaacggcatcgacgaatggcatgcgcatggaatctgctggcgatgcgccagatttaggaccggttgatgctgataatggagacatgattcggtcaatcttgtcctgggtagggtttaatgctgaaggagagcttcgggacggactgctagatagtgtgtctttcgcgggtggttgcggtcggtcttctgtttgaactctgagacatggtcgcactgagtcgttggttctttgttggctcgacgtcatatttggctggtgttgcggtgaagtaacctgagactgtttttctatggctcgcggcagggaatctttcctcggctgtagatgaacccagggctgagcgaccggctttgttacaacaatattgtgtggttgcacactctgttgtggtcgggtcttctgcgaggatagggtgttcttgtccggttgagaaatcttctgtgattgaattgttgtctgtggttccggcttgatagcaggaagaggtttgtcgtagctactagaggactgcggggtattggaacgctcggagaaaagcttcggaatgacaggtgactcgaacgatgagacgctatccatatttgaaccataacgaagctgtggcgcaggcatccttgatgggctttcgatagggagtgtctttgctcttatcaatgggtttggtccacgagagaaattctgagtgccgagtatctgagccgctttcgaagggtgtgaagttggaaataaagtaaagtctgaccgcgctggtgatgttgcccggcggcgttggggcactgggggtggtgctggcttgaggaagtcctatatcaatgcatctattagtctcataccggtttctcatcgatgaaagaccatacatttgcgtctggtacgagaagattgtccaatgtcttggcccttctggccagcagtgagggtttttggttcttgttgacgacatcgctgaacatgacactgtaccgctccatctgaatatccgggatttcgacactaagtaagagaccatgggtacttgattcatctttggttggcttgttgccgagtgaaaaattgcgactccgctggggagtttgatcgcttcgaccaggcatctttctgggttcgacctcaaacttcggccactcctccgtcgagttctttctcagtcttgctttcggtggtttctctggtagcttatagttgttgctgtgtggcttgaccacgctttcttgtgcgccacccgggatcgatgtaggcgcattctttgccttgaacaatccgccgatcttcttccacttgctgggcttatgggctgagtctctttctgcgataatgaatgtatcaaatctgggtggtggtagcggctcatctttggttaacatgccgggactgcccagcgcaatgccaatcatgtgttgctcggtttgggcatggtcagtctgaatggcttcatctggtggtgcggttatgcgaaagtcgaaagttgcaccttggcccgatggtggcttttttagccacccgtctcccgcagagggctggctgaaatcccactggccaatcatgggttgagctggacgctgtgaggcctcaagagagaaaaggtcgtcccgtggtaaggcatcggtataggtcaaaacaggaaaagagatggtctccttaggttgggtgcgtgaccggactgttgtcatgccccttgccatctctgtaattgtatattggaatccagccgataataggaatgagtgttaaaaggagaaaataatggaaaatgatggtattaaaggagagcagatagtaaaagaagagacgagccttccagaaggccaacaaaatgaaggaaacgaaacaaatagcaagacatcagggtataggccagtatattaatgaaaccagaggaacagattgagtggagaaatcaaataaccatataaacgagagctagagttaaccaaccggtctagtctgggactaaaccaacgaaacatgagaaacgaggccaaaactcgcaacctcattctgttttggaatttgaggggcctctcggcgttaatattcacgcccgtgtgagatgcttatttcccgccggacgaatgagcgcattggtcgacggattagctcgctaccaggccggaggcgtgtttcacctggtcaaaactgagacaatggcgtattattttccgttttacccttgaatcaggggcctttttcgctctggagcaatagcattggatgcccacatactcagtacagtgcagggtcatgaatgtcgtgactcgtgaattctccagcttcgcattgtgagtcgccaatgcaatgtgatgccaagcctgtctctatttccaatgggcatatctcaaggtctaagtactccgtatggtgtacggagtaagagacaaggctgcctgagacgaagataagaccatctgagacgaaagatgaatctgctattggtaagtagcggtcagatcaccccttgaagttttggggtttaggcactgtaaggcagcaaagcagtaaggcaccaaggcattcaggcattcaggcatacaggcactcaggcactcaaggcagcatgatgatcgagtcccgtgatctcccgtgatgatcgacggtacatgaagtgactgggctaactggactggactggtaccgcggcatgttatatgtatgtcatacatattcaatgctgtactcgacatgactgccttgaatcaacagaaaagttgttgatgttaagctcctctgtatatttaaagatctcccaccgctacttggagaatatccgatatcttatacacaactccacaccctacacaccctacacaattattacaatgtccctagcatagacagattgaataagatattctgaatcgacgcatcaatagacatacataaacaaaaataagcttgtatcccaagtcagttgcaaacggtgggatcgtcatatggcggggtcctctcccgaccgccacaacttcttctccccccaccaactccccttattctcccagctctcctttttttctgtatattcaaaaggtgcgccctgaaatttctgctttcttctcttcttgactgtctaactcaatcaactccagcgttattctctcagcttctttacagtcatcatgggcgagcactcagcaatctggcaaagtatgaatcaccttgcactgcagactgcagactgcagactgacaggtcggcccttgcttcttcgagttcgctaacatgagatttccctcgaaccaggctatgtcgacaccaggtacaccactgcccctcctcaaccccagatatattcctcaatgctaccatcgaaaccgaatcatctcacccgtgttatcctatacatatactgacaagcttcttttctcacagcctgatgggctcgtttcaattcgacaaggccggtattctcgccgctgatttctccggtgttgaggctgcctcgcccggcttcgcggtaagctcgcctattgttttccctcgtgcggggtggggtcacaggcttcgacacatccgctaacgttattggttgtcgaaatacagctctctcaagaggagatcaactccctgatcaccgcttacacttctagcgagaaggccttttcctctggcttctctgtctgcggtgagaagttcgtcaccatccgggctgacgagcgcagtctatatggcaagaaggtaagcatatcccttcgactcataaatacctcgggagttctatcaacgcataccactggaatctggtctaatctatttgatttgtgttacagggtaaggagggtgtcattattgcccgtgcctcctcttgcaccatcatcggccaccacggcgagaatgtccagactaccaacgcggcgaccgttgtcgagaacctcgttgattacctcaacaacccccggtaaattggaaaatattcaaggataactaaatgatgtgatgagttgaggggtttgtgaagaataggaaataaagcagcactcgactatttctcttttgaccccagcgtgtttttttcgcttatgcttcttttcttgctttgtgactggatctctttgcctcaatcggtcacgtcaatctagacatacctcccaatgcacagtatgaggatacgaaccagattgtatgaggcacgacgtaatttgtctattctaacatgcatattaactgattaccagccgcgctggaagatcaataagggtcattattaattacataaagcggaaggccgtagatggatcgtatcatccatgtatagcacagcgtacttgcacacaaacaaggtgatgtgcatccgatatccggtaagggtacatcgtgaaatccacatacacggagtctgggataccatcaaggaacctcattgtcgagtcgtggtttgtatatactcatacaggaagctcggcattgctcctcccaccagcaagcacctccagcccacgctggatatacggccctatcacagggatgttgcccgcaaattgaccgatggtgaccaggaagtcgccaaacaggatgaacaagccgtagagttctatcaaaaacccagtcaagggccagcggaagagaataaggaggataccagcggcgaaagcagcagtgcccttgagtttttgcgggcgcgtgaagaagaccgtggttttcctgacgccaataatcagagtcaatccgatgagaaagaggacctagcattgtcagttagatgtaacagttttgttagagcatgtggcacacatttcccatggcgagtctagttaacaggcattagcatttattctcccaaaaacgtgaaacttctggatagacatacaatgaccggtcaaagaacatcaatactcctccaaataggaacaagcctcctaattagcaaaatgaattagttctcgggtccgagtaattagtgatttgggaaggtcgatctcgtaccggcggagcagaagatcacaccgatctctgttatataaattagcctatgctcgacaattgctacacatgtactgtcacggtagtgaacatcacagcttgtagagcgaatgcgactgactctggttctctgttaaccacatgctaggcatccttcttttatttcaggtccgactgttgatgatgatatatgggaccgaaggttgctcaaatatccgcgatgtacttttgtaggacacacgacacctatcactggtgtgcgaaacaaatgatctttgatggttgtagactcggtagggcgaaaccaggcagatgcggcagggacaaagcggatataccggtggcgtcgttcaaagtgggtaatagcgagtctaggtttgcagtatgctcacgacgtgcaatattctcgacacagatcaaggtagcaaaagtcccgaggcacgtaaacaagtcaaaaatcacaattctgccgcctaatcagcgccaagccgggaatggtaggcggtgactccaaagcgcttatatcgcgggctgatcattcccttcttcctttcccttagtcttctccaatttattggcaattgaacaaggtcattaatgatgtgatagtttcaattgcataggtttgtgacaatctcaattttcagttctaaatctactggtattgagatataccgaactgaaccacacaatattgagcacagctcatacatactgctactcgctattgcagaaccttcctctctatgtatttttgtacatgccacgccgcgacgacagtctcttcggattctgtaactggtgccctgttccatggggtgtcggtaatagtcgagtgcttctgcacaaggcgaagatcgactcattgatcacgaataagccggagcgttttcttgagcctgtctcgaaaggggcatggtggggtggaaaaggcttgactgtgttggtcgtacataacgcttattgacgattcgtatttttgtctatctcaattgattagtagtgctctgacaatccagattctttcttgtatgacatacccgttcttacatgatcgttcgtttgggaattgataaagtaagcaacggccgccttttacttcaaaatagtgtgcgccccgcgggcttccaggtagttttctggaacaccctgtgccagagtccggatcaccttataaatctccttgttgtgataccgcagccgggtcttggggtcggtgtaaggtccatccaggcccgtgatgtcgcagtagtgatgctggtaggcagggttgaacgatggtgcggattcgatgttcgtgtaggtgacagcaggaccggttgggaatgtcgcccgggcattcttctccaagacgagagtcgagaggttttgggtggcctgggacaggttgggtgctgccccttctgcgggggtttgtgtgccatcggtgagagcgcccgagttaccaggcgtagtttcgcccgaattgacttgagttgccagtactgaagcctccttccgagaggcctccgagataatctgcttcagattcttgttgcgccgctgggacggtttccagtgagggttgcggaagggcttggggacatgtgaaatgtctagagtgttcaacagctgctggtgagcttcatcgttggcaggagttggtggaggcatgatatggaatatgattcaggatctcaaacggataaggtcaggtccaacgtaagaagcaatgcaagtagtatccccggcccgcgaagtctgtatagccgcacgtgatctcatcccgattaagtccaaataaacacctgaacgtccaatacccacacacattactcaatattcagtcatggtacgcggtttctcttccctgtatcaattttgatgcgatctgaaagatcccagatgctgatctctccttaggaaagcccccacgagcatcagcagacggtgctgctctctcgcatcatcaccaacgtcgtatgtgattgaaccacgtctgcaagatatactctactcaactcatacataggagaagctcaatgaagccattatggtcatgaacaaaggtctccaggtaggttcaagcctctcattgatattatcatgttattgactctatcacaggaagtcaacatccagaacatgaacgttgagcttgtggcgcagatgtttaagaactaccagtctaatgttctcttccatcttgaaggtatatatgactatcatatatcagaaaacctctactaataccctctagctaccgagaacctccaagacccatcctaaggaattctgaggatggataatttcatgtaacgaggaaatgtatggacgagcttgcaattagtcaatgataccaacttctaaattcaataactaggcacatttaaatggttgtaatcgttgcatccctgtgctccgtactccgtaccagcgatagtgatagcgatagcctctattcttggcggtccaactccgccaaactcatcaaccgcgtgtgtgtcctctttgttaatccgctaccctttctgcggtttattagtttcctcatatccaaccttattcccatgcagtgagccctcttcgccatctacagatctccgaccccaatagctcctggtttctggagcgcagcccgccatgacgattacctctgtgcacaccctcctaccagctcgcattgcatccaatgcgagtgaaaaacgaaccgagaagcctcctccaaaactctacactgtacaagactttccattcaagggctaccaccctccgcaacccgagggataccagcagagcaaagcccatcccgacaccagtgctattgtcattgacaatggtaagggattccataactagagtttgtgattcaattctcctaacagatgtggtgcgcaggctcccacctcgtcaaggccggttggtcttttgacaaaaacccccgattcgctatacctcccgttatgagccgataccgtgatcgcaagctcaatcgccagtgccaatttatcggatacgatgcctacgtcgatgcgaccacgaggggacagctgcgcaatggctttgaccccggctccagtgttgtcggtaactgggatgtcatggaaggcgtgttggactatttgttcctcaagctgggcgtggacggcgcagatgggggcgtcggtcgcccgatcttgatgacggagccaatcgccaatatgccatattcaagaaagagttagtatcgggcggttttagggccagtatggctgttgttgacacacctccagtgatgaatgagatcctcttcgaatgctactccgcgccatcggtggcctacggtatcgattccctcttctcctatcgctataatggtggaacggatggtttgattgtggattcatcgcatacctctactcatgtgattccggttatgaactcgaaacccatgctctccaactgcactcgtctcaactggggtggcctgcagagcgccgaatacttgatgaagctcatgaaactgaaatacccgaccttcccgactcgtttgacagacgcacagatggaggaaatggttcatgagcactgttacgtctcacaagactacgagcgcgagttgagtgggttccttgactggaccgggctcgaggaccgcgaccgcgtcattcagtacccgttcacggaacacattattcaagagaagacagaagaggagctcgcgcggattgcggagcgcaagaaagagagtggccgtcgcttgcaagaacaggcggcaagaatgcggcttgagaaactagtgaagaaggagcaagagctggagtactggaaagatctgcaagagaccctagctaacgagaccaagaaggaaatccgtcgtatccttgaagccgaggatttgaaagacgaggcggcacttgaaaagttgattcgcgagctagagaaatctatcaaacgctcgcgcaacaaggatctaggcattgaagaaactgaggagcagccggaggaaatgacattccctatgctcgatatcccagatgaccaattggatgaggccggattgaaggaaaagcgacaccaacgtctcatgaaatctaacgtcgatgccagactacgtgccaaagaagagaaggagcgcgaaaaggctcgtattgaagcagaggagcgtctagaccgtgaggcgcgtgagaatgatttcgagaactggattgcaaagcgtcgcaacaatcgccaggtatcttggccaaacatgatatcctcgatttccgtgctaatatttctcagggcattctccaaagaatcaaagaccgtgaccgtttcacggccgatctcggaaatcgcaaatctctggccagtcagatgcgtatgaagacgctggccaacctggcatctgacggtcctaagaaacgccgtcgtggtggggatgacgatgacttcggtgccaatgatgaggactggggtgtttaccgcaccgtagctgttggcgagggtagtgacgatgaagaggaggaggatctcaacggtatgctcaactctgtagagaaggagcttctggagtacgaccccgaattcaccgagaacaacactttcgccgcacagtccgactggacgaagagtcttgtgcacgcgttccttcgcgggccctggcctttcgatccggaaagccagcgggaggcacaccagctccatctgaacgtggagcgcatccgtgtgcctgaggttgtgtttaagccgtccattgctggcctcgaccaagccggtttgatcgagattgcggccgatattattaaccaacgatattccaatccagcagaccagtcccttcttttgagggatgtgtttttgactggaggaaatacgttgtttaccggtttcgatgaacgcttccgtaaggaagtccgcggattcctgcccatcgaagctacactgaatgtacgcaaggcatcggaccctgtcttcgatgcttggaagggcgcagcacagtgggcttctggtggtgacctaggccgatcctcggtcacgcggcaagagtacttggagaagggcagcgaatacatcaaggagcatgaactcggcaatgctacatggtgaggtttaaaaagcgcgttctaagaacgcctgtctgggcgcactggagtcgaatggttctgcttatccggcgtggtatattaggacatgtttatctaatacttcaaagattttattgcagaaaccggcggtagtaagcgaaatatgacatgttcagccctctgtatggttactttaactatgttaatagagccggtcttgccagagcatggggtagtagaggtgataagtataggctatctatgcatctcgatggcaagggacccggcgaacgtattcattccccaggtgagacacgctccttgcatttatcaatgagccatgtttaagatagctggtctagaagactgtcgatcatggcttatgcagggagaccccgctagtcaactattgaagctgcatattatagtcttgtttttctcatgtctcgatggttatgcaccggcggtgccattcactctttctcgctctgattggcacttgataagtacaacaccacaagcttaagcagacgttggattatcctccgcaaactgccgactggcttttgtttgtttggggttattctcgaagtcgccttctttatgtaaacctctaaatcgacctcacttatgtctttgcgtacgagaacatgacattgcccttaccacatgacctagatatcgacgtcgtataaaatagaactaaaatgaacttactgcacgatatagttcgaatagctacacaaatgaaaaggtaaacaaatcttcaactacctcttccgataacctgcagcagaaaccattccagattaggatatgggccagacatagtgacttcatccagatgccatcatgacgcacctggagagtttttgcttttcgtccttgctgaccctggccatggactgtggtgggtcttattgtattttatacctagcgtcagtcttgtttgtttgccttcgttcatgctaattccgagatataaagtccttctctttgctcatttgccatgaaggccaactcttttcccccctcgctgtatcgcgccccctttcacgttttatatacttcttggtccttatacaaacgatggtcttctcaacaaacatcgctcgtccactgcaactggctactcgcgccatgcagtggagtagcgctgtcattgtcatgggcctgacctcgttcttcatcaatcgcggtccccatggtcagcatactatctaccaagaagtcattgtacgttattggcgctctatttgatcaaacagttttcacaaagccatggaatctaactgcaagcttaggctgtcctctcagtcgtcttcttcctcctggcttttatctcgccattcctaccctcgttgagcagattcgtgctcgctatcgacgtggtattctcctacctgtatgtcagcattcgatcatagtgtctgcatcgaagtctctaatatccattccagctggttgactgccttcatcttctccgcacaagactacagtacgagacggtgctactttgctattcccgcgggtctcaactgcaatagcaagagagccaatgaagctttcatcttcctagctttgtatggcctgaatgcccccagccgctatggataggtgaaaactaatatatcgcagtatcttcaccttctttggaatcttccttgaaaccgccgctctatgggcctatcgcaaggaaaacaccaccgaacgcagttatgaggataaagtccatattgagacccgtccacctcttgatgcgcctacagttcctgcagttcctgctggaactgtctaaccggtgtttcaactacttctctggataaatatgcatctactatctcttgttgacgttctcaatcgttgtggatatattatttactgggatgttcaggaaaccgtcttgtgcataataccttatatctggactctttgattcttccactagccttctcttttggttttatctcggtggacttggattttggcaggggccaaattgaacatatgtttctatgagcggggatgggagggtgaaattgatatctgatggacagtatcgcaggctcgggatacgaccttgcagtgtgctctctcccaataacttaatccattcattacttatactgtgaccgaaaccttcgggtgtccgatatggtgataccttttccctttcttaatcaacattacacgacatactgaagaggcctctcctatttcaggtttttcatgatgttctagccgaagggaaaacataaaggctaaacaataatggcctgattcgcataactgaagtaaaaatactggaagtaaatgtcatatgactgccagcaaagctgtatttctattttattgtctgactatttacaatataagtatacactgaatgtacaggttcgataaaagaagccacccaatcagtatcttacgcaataaagaaagtaagcaccaagcagcgcgaatcgtacgcagtcttgcataccggatacaaaaaaggtcaagtctttgcttaattggactcgacatatcacgcagagcttggttgaaggataaatgttggaacggttagatactagctcggcgaggagccatcgtccgctgcaacttgcgcttttcctcggtttcctccgtgataggcagtgagccctcgctcctcaagcggtcgaggaactcctttccatatgcatagccgacttggtagatctcgtcaaatttaccgaactctagggtaccatatgggtcgacaggaggacgcatgtatagacagccagtcgtattctttgcgcgctcgagattgtcgaacgatgagacatacgccagtcgtgcttgtatttcggaaagtgtaggtgggttcgggagcgaggagaagggattccaccggttgaacactgaccagaatcctgacaatgagtctccgaatccctggggtgtggtgtcatcgatagatccaacatcaattgcgaagatagcatccgctccaagacttttcatgtgcgccactgtgagattgtcgatgtagccaccatccaggagcatactgccttcatcacagataggaggtatcaggccggccaatgtcatcgaagcccgaacgtaccgccagacgtaaccagacgagtgatactcaattcgggatcggctgatgttggttgtgttgcagtagaactccaaccagaaatcttcgatttggctatctccaaatgtcttgaagattccccggttgaactcatgacctgtggtgtaggaaacagtgggataggtcaaatccaatgcaaaccgccacatactccccatgcgcccggagaacttcttagctcgcccgtacatgggaacaacatcagcgtcacgcgcgtaaagagcaccaatgaaagaaccaatcgacgtgccacctatgatatcaattgggatcccggcctcctcgagggctttaataactccaacatgcgcaatgccacgcgctccacctccgcccagtacaagacccacagacttgccgcataaacgccgagccagccgatggaaatcacccttgaaggaggtttgcggggaatagagtggagactgttgtgcacgccgggacgtatacttttggatttcggcttgcaaaatttgcacgcgctgcttcagcacagtaccgaacttcctagtcggcgggtgtgaaggctcggtggtcgagcgaaagcccatttgaatgtggtgatggccgccgttaatccacacccggttcttcagccattcccgagtcagtccaggtgcacagtaacgctctgcgtgcaaaagaactagttctttgcgagcagtggtcttcatgcctagcaggaagcgctcatattcaccaattctaggtgaagactcggcgaggcccaccaacaggatagagtcagcttgcgcaatgcaagtctgagtccacggtgcgttcacattggtgtcagcgatgtacaagaccattccgaatttctcttcgaggtcagccaggtattgagaaagcttaagcttccccatcttagtgaaggcgtggcgacccaagtggttcaaaattgtcgcttggttgagtgacgtgacacctctgggcacaccaatttggtgcaacgcctgcaagagtctatgtccaaattctacgaccgggacgccagaaatgatgggaagaattgccacggtgcgaagattgactgttgaggttgcagtctgaacactgccagtctgtccctgttcaatcttcttttcggccagcggatgctcgactaaatcacgcattcgctgggcaataagtttagagacctgcatggtaattccaggatgttcctgagcgagactgttgaaaagagaccgggggaacttggctagttccgtttcccggatagcatgcaaggtagacggtcttgtagattcagtcatgacctcgagttcgccaacactctcgccctggccgtgttcaccaatgacggttatcttgccgtttgatccctcaaggacagacctcaggcgaccgttcagaacaagataaatagcatcgctttcatccccttggtggtaaatcacctgccctgcgctgacctgcacccactccagcgcgaaatcaatgtggagcagcaaacggggcagcagaattgtcaaccgctttgctagcgttaacagagcagttggatgtctatctgcgattctctcaagggaagcacggggaaggaatccaacgtaaacatctgtcttggcgacaacatcggtgtacgagcggtacgatgcaagagcacctacatacccttgaatgccaccaggtttgatcaggtatagcgatttgcgggactgagtctttcgtcgagggtcattgctgcccgctgcaccagcgcgcgacgatgatgtcgttgttcgtctcagcttcgggaacagctcctcttgcgcttgcgagccagatacatgagaggccccaataagggtgtcattatgttcattcgccggaatacccacgtccaagaatccgtcaatgacgtagtagaggcctggatggcgctcacccttttccactaaaaccgagccttggggaaagtaaactacttcaatgtcatgtcggaggtcttcccgtaggttgatgacaggcgaagtcccccctgcacttgtcactgacatggaggacatcatggattcagtttcgccgtcacctgacgcttcatagggatcgatgaagccaaaggcattggagaacacagccttctggcggcggttatcgtaggagagtagtctcggcgacgcatcaccagaatggctgctcttgcgcagagcatcgcgtgtgccttcggtgagcccaatgcccttcatgatacagtccaggatcgactcgcggaaaatagcgtcctcgtcaactgactcttttagctggaaagtcgagggtagaccattcattgcagctgtggatacaaattgaggttgctcccgctcagtaagaggagtctggaggcgaggtgccaaattttcatgtcgcggtccaaaccgggacaattgtattgtcgatagcaaatcaccggggctaacacttgccgagtccctgtcaatgaatggtgacgacctttgttggctatggagtgtgaggggacgctcacttgacacctttgcttgtaaaaaggcttcttttctgagagtactgctcgagcgtcctctacggcccacagaaggattgtgaagagcaatgccttttccgatttcctctggtcccaatcgatctcgctctcgtgtgaacttgtccttcagacgatccaaggcactccctcgaagattattcggaaggtcccaagaggtgaatttagacatttgccgctctatgcctaaaacctcgctagtcaggcccagataagaatgcgctgtagcaaacgttacccgctggagacgtgtcaggataacctggacaatgtgtgacgttgcccgtgggtagactctggtcaggcggcggaatgcgctggcagggatgatagcaatcgtcgtgtctactgtagctcgtgccacaatatctgggtgtaccgacttgcggctttttttctgggcattgtgtttagtctccgaatgtggggaatgtctgtggttctgccggggcatggtatggctctctccgagattcagcggaggcactggtggcaatatattgccagatccaagggatgcagtgttcaaattcccggcctctctcacggtggacccgggactgacagcaaaggtatcaggcacatgagtctggccaaggctaggactggatatactggagctgtgacttcgggagttacgaagctcaatgtcttcggtaaacagctggagaatagagaataaagacgacattgaagcgccgttcttgacttcagtgaggagctgatagccctgtcggttgtgaatgttccggtcctcctcgtctgaagaggcatcatcgtccatatagatattctctcgcgaacctgacttcccttcgcgtgctgatttcacgaagatctggaccagcccatccacaaccatgcagaagcccttctcctcctccagcatgagcgtctctcccgcaatcagcttcctagtttgcatcgtccgggtaagttcgtggaacacgggccgttcaaggtacccaaagactttgatagcactgaggaattcatccagatagttggcaagtcctggtttcgagtccccttcctggatatcagggaacaaatcgacctgggcttctttgcgttgaggctccgggggcaggcgactgtacgtgttcaggtaccggtaacggatgaaccagctgagggtcgatacaatggcaaggaagattaacattctaagggtcatgaatggtcagcaacggtcaagaatgaagttagcaagaccaagacctacatggtggtgaaattcatagtgaacgtcaagctcatagagaaaagcgtaaagagccatgtggggagtgtaattgtcgcgaatgtgattatcgagtagagaaggcttgggagggtgtgaaatactagggtaaacacccatccgatccaccccatcatggttaagggagctggaggggactgcgggggttgagagaaataggcgctagaagcgagggaattaattgaggttgaagttgcagccgttaggctgagggcgagggacggggccaggccagccatgttaaacacatgcaagattggagagctccgctttgtgttccacctgggcaggtttgaggtcgagactaactcagattgacctagaccaattcggagttgaacccaaccgtgggcccattaggccagaagattgaaagcatcgtactttatacagagtgaagtggtaggtgggatatggatgggaggggagagggaggttcctagttcccaagtcacctgctttacgtttaaaggcggaatgtgagattcgcatttgtatcagtttatgatttcaactcatgataatattctgttagcctattctgttccaattaatattctaatgttattattttatgatcctatgatcctatgatcctatgattccaaaatatcccggttataacaggccaatccacagtgatgtaattgtttacaacatcaggccttacacacgcaggtaacaacacaacttcaatttgatatatgttgatacttggaatgcgagcagatctgaaacataaaatgtataaattagagaagttgtagatcccattggtgtgttctacatagccctttcacgcaagctgtacagcaaatatatatgcaacgttacagtctcaaacccccgatacaactagaaataagaacaagctaaataaaaagcactgggcttagttcgactgcgaataaaaatacatagattaataaaaaaatatactaatcttcatgaattcaagtctccaacatggcaaaaaaagtaaagacagcccaagttgaccttccacatggcaagtttccgccttggctacgcttccaaccttggaaaccaatgctccccctcacttccttttgcggattgctattcttcttgtttttggtaaatacccttgccagtggtcttgcgtttctagattctgttgtcgtctgggttctcagaaccgcggcaatgtttcaggtacctattcgccctttcgatgatgtgtgcgccttgtgttctcactaacaccgtcacagcgcctccgcgacgccatcgactctcgcattgcagaggaacaagcacgtcaaaagtccgcccaagataacatcgaacgctccaattccgctcgccgtccgcccggacgtaaccagtccccgagtcggcgcgcccgtcctagacgcaacaccggtacccccgttcgagggcccgaccccaaggagttcgaagctgaattcaccatcggtgacgatgaatccatcaggtccggtactccccgagcagatacaccagagcctgcttcggaagtaagcgcccctaacgagggagagagccaaatggccgaaggcaaaccggcggagacgcccgagaaagagacaggagagacggagaccaaggaggcacctgctgtgcttccacctgatgttcgcgcgaaattgcggcgacttgataagctggagtcccgataccatggtatgtacctgcctgactagactacagggcacacgactaactgaacgtattagaattgctcaaggcttaccgtaccgcccactcgcgagtcctatccattgaacccttcgaagctgctttgcgcgagaacacccccctcacctcgattggcgaacccaaagctttcacggaatacctcaaccaatcaaccctgaaaagcgatatggtcatggatgagctgaagcgcgtcaccgaagaaagagaagacttcaggaagaagtttgaagaagcgcagcaggctaccaaggaggctttggatgagcttactggcctcaaaaaggagaaaccccagacggagacacccatagggacagacggaacaggggaacaagctagtgaagagttcttttcgtttgataatgaagttccccgattggaaggcgaacttaaggagaagaaagaagaggttgagaacctcaaaaccgaggtcgaaaagctcaagcgcgatatgtctgtcacccgcgagtcgaccgaaggtatggtgcagaatttggagacagccacccgcgagctcgtcgagctgcgggaaaccaaggacaatctagatgctgagatcaagactctacaaacctctaagaaggccgatgtcgatgacctcaaggcgaagctagcaactgcggaatcctctctcaaatcaaccacattggaggtcgagaagttcaagtcgcagctcaaggagaagagcgaggaaatcgataagctccagaaacaagcctccgaaagaaccgagtctgattcgaccctcgctgctgagttggagacgaccaaagaggaaaagaaatccgacgagaaaaagctcgttgtgctccagggcttagttgacagtctccgatctcagcttaaggataccgaatctaccgtgttacaattgaagactgagatcgacgagaggtgcgaacattctgccaaactacaagacatttttgatcttgtggatgagaacttgaaagagaacaaggcgtgggtatctaccaaggagaaggttttcgttggagagttggccgacttcaatgaggttatcaagaccctggtgccggtcaaggaagagcccaattctactgtctctgctcctgtcactaccgaaggagagacacaacctgctcaagctactggtggtggcagcagtggaggaaagaagaagaacaataagaagaagaagaagggtggtaaagctgaggaaccttctaagtcgactgatgcagcccctgcagagcaaccgcccccagaggcgccttccacagctaccaaagagctggatgaactcaagcaaaagatcgaatctctcaccctgcaattatccgaaaaggaggccgctatcgaccgtctcagttccaagctaaaaagcgaggacaatctgaaggaagaaattgagtccctgcgcgatgaccttatcaatatcggccaggggcatgtggcagcgaaggacaagatcaaggatctttcagaagaaaggacctctcttcaagaaaccatcagcaagctcgagaaagaattggcggaactccgcaccagcaacgcttcgacctcagctgattcggcgaaggtgcatacttcactcaaagaggaattcgataacctcaaggtccactctgttaccttggagaccgatctttctgccgctcagcagctggctgctactcggttcaaagaccttacagacctccgtgaaactcttcagaaggttcagcccgagctgcgcagcctacgtgctgagtcttcggagttgaagaccctaaaggagaccctcgccagcaagaattccgacctgaaggtcctcgaaggcaagcatgaggatctgtgcgctgagctgaagacatttaagtcgagaatctcagagcgtgacgcagaagtgggcaccctcactaagaagatccgacaggagaccgacagccgattgaaggcggaggagtatcttactgttgtccaatccaatctacgctctgctgagggcaaaaagcaagatgccatcaatgccagagacagaactgctgccgaactctccaagacccaggacggtttgaagaatactcgcgccaagatgcgggagatggatgaacatatatctcagctgaataaggagctcggaagcctccgagaagagatccagctaaagacagctcagtacactagtgcccagagcttgatgaacagtatgcgtgatcagacgacggaagttgcaatgcaaatgaaggaggctcgtgagcgatgcgagagcttggatgaagaattggccgacgcccaccgtctgctgagcgaacgaacccgcgaaggcgagaccatgcgccgtctgctcaatgatatcgagggtcgttcagaggctaaggtgcgagacttcaaggaacgcatggaggctgctgtcgaagagcgagaccgtgccgaagatgaagccagcactcaaggtcgacgccgtgctcgcgagatggaagaactcaaggctaaggtccgtgaagccgagcgcgccctgcgcacggtggaacaggacaaggaggagcttgaacaatcccaaaaggactggcgccgccgtcgtgacgagctcgagtcagtatctgagaagtcatcacaggaagtggcagagattcgacaggccatggccggtctacgcgatgctctcgacgaaagtgagaagcaagttcgcgacctcgaaaaggacaaggcagagcttcgtcgttcagtggaagagacaaacagccgactggagaagctccgaagatcccacaagacgctaggagaggacgtccgcctacgtggctccccgtccggtcgaccatcctcgcgatcatctacggattcaggctctcgtcgggccgtcgtatctcctggcagaagcgagactcctcttggaccacccagtaatgcatctattgactacatgtacttgaagaatgtccttctccaatttttggaacagagggacaagaactatcagaagcagctaatccctgttctaggaatgctgctccatttcgatcggtgagttttttactgaaccttctctttacaatggtcactaacaaacatagaaacgatgagcaaaagtggatgtcggccatcatgtccaaataattggcgtttatacccatgggcgttgattgctatctgagtcccctgctctgtacaatatcattctgtagagataataatatgtttccgctatcagaccatacccctttgcctatgaagacaacgttcagatatccttatccaacatctagttagaagagctcggtaatattacctaatccggtatagtaaaatcctggggttatcgcgaagcttcgccaaaacaagcgacgcgcatatactagcgagtacaaaagtccgagagaagcaaataaaaaacagctaagctctgtaattcgtcatggattatcttcgtcctctttccaacgccatggccgaccaacccaccattcgtctcgcgacgcccgagggcaagtgcattgaccccaaagcttctgagtagctccccaattaacatcaactagatgtccccttgatcctccaattcatctgtgaactagccgactatgaaaaagccctccatgaagttgaagctaccgaagaatccctcctagcaactctctccttccctggtaccccgcccaggcgcggggcggtctatacagctctcattaccccgccggctactgccgacacaccgaacccgatccccgtcggcatggccttgtacttttacaactactcaacctggagatctgcccccggtatctacctcgaggatctgtatgtgcagcctagcgcgcggggtaacgggtacggcttcaagttgctcaagtaccttgccaagcaggtgctggaggcatcgggtcggcgattggagtggagcgtgctcacgtggaacgagcctagtattaggttctatgagcaggttggtgcgcgcggtatggacgagtggatgaagatgatggttgaaggggatgcgttgactcgtttggcggaggatgtgtagagggatgcatgggtgctaggcgggatagggctgggttgtcttttttttatactacgaaaggcactgggaacggatcagagtggtttatttatattgtagaagctcattgcagatcgagaacaaaagtgggctggttatgcgtgcatgtttagcaaatatctatgatcacagctacatatggctcaatgtcatattttcgaaaaaagaaatttatatcgaagtattagaatccaaatctcacgtcattgatgtaattgaatacaaataacatccaagttgggctgtgaggtagatctaggggcgaagccttttagcgccaggtgacggcattgacccgcagatcgcctcgatttgccctgttccactttctcttcttccttcaacaccctcagcgatggcgacaactccagagaatgcccaggagtataacttccatgtggactatgttatccgttacagcttcggagacgtaggtgagtaaaagagagctctagcatgtgtcgcggggcacattctaacaattgcagaccgatcgcaggcaattgagcagctcgaaaaattgctccaagcactggccctagttggtttacaggttgaggtacgacagggtgatgagtcgtctctgctcgtctttgctcgagcttcggaaaaccggctgaaacgggcggtctaccggtcgcggtgagtgatgatgcatgtcgttctatgccaatgtgctaatctcgactttgaatatccacagagtacgcgactggctatatggcattcgcaatgatgagcccacaccttccaactcgaccgagccgcagaccgaggctgagcgcctgcgagtgatccaccagatgattacacttcccaaggaagagggcggtgccgccattacccccaagtatggcgactggaagaatgtcactgctatattccccattcatgatgtcgatacaaataaaaagtggatacgagactggagctcaaagactttcctctccgatgacgacttggatcagatccggaacaagtttggagaaagtgtatgtacagcgaagttgttcttctttgtcctggctaacatatgaggcaggttggattttacttctcgttcctacagtgttacttccgatttttgattttcccagcagtcttcggattctcctgttggttcctgctcggcggatattcgattatttatactgtcgtcaattgtctttggtgtatcatctttgtggaatactggaagcgccaggaagttgatttgagctgcagatggcaaaccaagaacgtctcagctgttcggaccaagcgacgagagttcaaggcagaaacagaggcctacgatgagggtaccggtgagatgcgcggtgtcttcccggcaactaagcgcatgcaacgacagctacttcaaatcccgttcgccttgcttgcagcaattgctttaggtgctatcatagcgacttgctttgccattgagatcttcatctcagagctctacaatggtcctttgaagacatacttggtatggtgatccttcccatttcctgtgaccaaagcttacccttcagattttcatcccaaccatccttgtgtcagcgcttgtgccaaccatgagcgccatcttgacgtctatcgcaacgaaacttaatgattacgagaaccatgagacaagtgacgcctatgatgttgcattgacccagaaggtctttgttatcaacttcatcacgtcttacatgccaatttttctgacggcctttgtttacgtgccctttgctagccgaattgtcccctacctcgatgtcttccgcttgacagttcggcctttcgtgtcgaaggaacatgccatctcaaagcgatcgaatttccaaatcgacccagctcgcctgcgaaaccaggtcgtctacttcactgtcacggctcagattgttggttttgcaatggaaactattgtgccgtatatcaaacagcatgcactccgcaaatacaaaaagtacaacaaggagcgcaatggtaagatgaacggaaacggcgacaaagaatcgcctgaaagacccgtcgtgtctttcgatgatccggtcgatgaagtgcagttcctcacgcgtgtgcgcaacgaggtcgagcttcccgagtacgatgtgaccgatgatctacgtgagatgtgtattcaatttggatacctggcccttttctcacccacatggccgcttgttcccctttcgttctttgtgaacaactggattgagttgcgatccgatttctttaagatttgcatggagttccgcaggcctgtcccatcgcggactgacacgattggaccttggctcgatagtctgggattcctatcttgggtcggtagtatcaccagtgctgcactgctgtacatgttcagtggcaacacgcagcacgggcccaatggtgagccgacagatatcaaaggctgggccctgcttttgacaatcttcttttccgagcacctgtatcttattgtgcggtatgctgtgcgggctggtatggctaggattgagccccccaattcccgcaaagagcgggctgatcgttacctcatgcgcaaacgctaccttcagtcgacaaccaatgcggaggtggacgagaaaaacgatgaggatgatatcacatatatggttcagccaactgacgtctcacgcacgtctcttgaagatgatgctcggcgtgcgtcctcgcatggcgccgacccggacaaccgtttctggttgcaccagcggggctggatggagtcggcgaagatcggagctgggatcatacaggcacagcctagcaacgatagcgcgaagaagcaacaatagtgcttcggagttggacagagtcaggatgtggaggcaggggcttgagaggcctatgttatggggtgggatacgagatcacgagactatatacgttcaacttagtacgcgatgtgcaggtacatagtaattaccgatatacgttcgatctactttttaagctgtcctaaatggaatgattgtccagtggctggtgcctcaggcagaaatgtcggagtacgtggtgactatgatgtcatgttgacttggtcggaaacaagtaaacccgttccgataccggatatgggcggcatgtggtcagcagtagaacgaatcgtcgacatgtccatgggtacgacgagatcatgcaattggatgaatgtgacgagctacatagtacatatcatgaggttgttgttaaacccaatcatagccaacatgtggtatcaaaaccagtttagcggcaaaaaagtgtcgagataaactctggggtaggagccaccgcctcactcaccgcctactcaatgcgacatcttcgcttaccaactccttacataaatcgacgatcgccccaaatcctctgactcagaatccttaagtaatcctcctcctcctccagggcccgccatcaacttgcttacagcatcggatctgtaactgcttacctcattttagctgtattttgtgttcagcaaagcagctctctttgctctcaattcttttggaaactaaagtgccgtgcaaagtcactgcccaataccctctcgaatcccctttctgcttaatcaatgcaacctgcactggcgccagcgccgcatccaagcatgcagacttctgctcaggtaagcaggtcatcttgaacgcgtttgtcatcagatctatatgacttcctcgatgctttggatacaagacacttatgtcgcgttaccaaaatgtcgggacgacgtttcgacgcgtcgggtctccctgcagtcttgccacgtcaccttggtgcttcgttttgttatttgctactgtccatgctaacatatgactgtaggaccatgcggatcagggtacgtgattatagtttagagctttattgatgtttaattgccattacttttgggggattcaaggattcgcggttttctgggttgaaaataccctaccccgatcttctacttcatctcacctaggaaaattagggctgcgcgtcgcacatgattgttccccattgctgacatgatcttatagtcctccatgaccagcttttggctgctcagcaccacctaggcggtcgtccgcagggtgctccaggccaacaacaacacttgcaacccaacaatgctagcccgcgcgaccagccaaacattgaccctgccatctcgggtgccatgctcggcgctccccaaactcccacccaaccccagggctctcccccatctgacggcggctccaagagctatgggaagcgtgagctgtccacttctaagcgtgctgcccagaaccgtgccgctcaggtatgtcctttagatatcgtacacagagtactctgctaatcatcagaatagcgcgcattccgccagcgcaaggaaacctacattcgcaaactcgaggaagaagtgaagaacatcgaccccctcaaggagcaggtcaagtccctggtgggcgagaactaccagctgcgtgaatatatcatcaacttgcaatcgcgtcttctcgaagcccagggtgaagtccccgagctgcctgccaacatagatttgagccagcctcgcaccactgagatggcgcttgcttctgccggaattcagaactctagccctccagggtcggtgcccaccccgggtgcacaaggccagcactcttctgtctccgatgacatgaactctctgaaccgcatcgctgcggcaactcttggaatgcgtaagcaccctgatgacacggccttcctcaacaacaacagcttccagcagaataagcgggtgcgcacagatgatagccaggacggaaatgacggcgtgaacaagcaggagattccgcacggtcttcctatggtcaactgatcgccatgccgttttaatgcgtcttgattgcctacgttctgcgatcacctttcgatacccgcgtctgtgtcttttgtttgcttctgtcttattcagcttcggtgttacgttatgcttgacgacgacacttgccatatttctatctcgcctgttctgctggatctcctgtgcctttctactttaccgttatgtcacgtcccccctttgcgtaacggtgtgtggcgcagcgagtgattccatcctcttgatttcgaatacgtgattgggtggtgttttgagatttgttaccttcattgtggcagattgatggggagtttattattattaccgcatttgtttcatacttcaatttgatctatctgcttaattgcttaatggatggtcacaagacgcggatacccatacctaccccagcggactttcgctgcctcgtgggcgatttctatagcactcctttgatgaggactttataatgtcgcccagcgtcaagcttgctgggcaacttagtccggtctgaggcttttgagctgctccgtgctatcgggtttatgtgggctgtactccgtagtatactaatattcttcggcgttttcaggccttgtctaaattaattctttggaatgaagtgaataatcatacccatagactagagatttagtgacacctttatggagagatgagatccgatattaaggtaatcaaagcgagaggtgtggctacatgtccgttctcacaggcgaagaagtcggttcacttccagtaaatccgttcacttatatatacacttatacatgatccgtgaatctactgcaaaaagcatgacagcattggcctcatacgatatgtagtacttgtatacttttagtgcttcgaacaccttcagtctgggagaagtctagttggatatttcactgcgaaaaactgtcatgcttatctatttgtgtccctgcgttggatatgaattctcgtggccagtccagattattgaacaaccttgtcttaccaataccgtagtatctatcacttactgtttatcgaggccatattccttgataaggatatcagcacaagtaataccagtcacgtaagcagtagcctgggtgtggttattagtgaggacaggaacaacactcatatcagcaacgcggaggttctccatgccccgaacacggaaacgcgtgtcaacagcagcatcactggcaccagtcttgcccatcttcaccgtgccagtcatgtgccagctggaacagagcgtgttcttccagaactcgaggatgtcctcgtcggaatcagacgcaggccccatcagcgttgagatagtgtccttcgcaaagcactcctgtctactgacatcgagcaggtgccgataaatttcgatacaagcgcgacgatcgtatggatgtccgaggaaccgcgggtcgaacagcagcgggacgtctgggtcagaggactgcaggtgcacttcgccgcgggattgttcgtttatcatgaatgctacaagacagctatagctgtaatctttgaacatttcgggcttcatgcaatggaggggcatgtgggtggctatctcgtagtgggggatggtttcgcggttcaggaactcttgcacggatgttggaagcgctttgaattcgggcgaggcggtgatacggtctgatttaaaccagccggtgccgatctggcagcagtatcggttccataggccggtgttgtcgtgaagccactctttcattgcagcctccatggcggcgggatctttgaagaaggaattgcggtcatttgtctcagggttacgggcaagaaccagaggaaccaagtagtggtctcggagaccctggccaatggcgggcagatcgttgaccactgaaatgttgaacttctcaagctctttagccggtccgattccagagtgcattagaatctttggggtgtcgagtgtgcctgcagaaagaatcacatctcgagaagcgaagtctgtaatccatgtcagacgaagtgcatagtaagagttcagaataaaatatacactttgtgccctgagcctctactccaacggcctttttgccttccaacaagacccgctgtactgggctgtctgtgacaacgacaagattatgaggaacattttcaaacatatcaacagccgtggtacgctctcccttccaagcagaattgattgttgcagccatgccaaggggattgccggagttgtgatccaagttgagcttgtgtccagccgcttcgaatgcatccagcgtgggtgccaagtccctttcccaatcctgggcatacccgacgcgcaagggacccgagtggccgtggtcggaagcaaccgaacggacatatttctgattttttggaagtacacgaccatcgaaggtctccaaattcttgtagcggatatgcatctccttccatccgaaggtatcgtcatccacctcagatgcccactcatcgtagtcatcccgcgcgcctatagcaaagaccccgaagttgattgccgagctacctcccagaccctttccacgggaatagtcgccatcgtgcccattgcaatattcctgtggtgtggtcctgtacccccagttcatgcttggttccctcaatgtcgtccaacgctttccattcactcgcaaagctttgtcatcattgcgcccacctgcttcaagaagtagaactttaggtctttgggctgatttggcgagccccgcagccacggtgcaaccagctgggccacctgttcaatgatgagcatgagagattgcaggtgtgtatagtgcacgattacctccgacgatgacaaagtcgtatgtgtttttagattccatgttgaaggtagctttctagagtcaagaatttgtcaagagcaatcgtgaagaacctatttagatggggtcagtggcaacacgtcaagtatatgtcatatcttctttctggcatgtttatgccattattccgtctttgcgtgcattaacagtaagccaacatgtgaaaaatagtacagcgtattaccactaggccacaataattggtcttggtctaaaggcggctatatctgttctgtttcttgtctgacaccacacactcaacatgacgggttgtactcggtacaccttggaagaacccaacaatagatggggcaaggaaatatacacccccaggtttaagagggctagcgtcgagactgcaatcctcacaggatattgcatttgtttatttacgacacggctaaatgggcccttgagtccaggaggttcgttagtcaggtcaattttgcaggggttgtaaatgtagatcctatggcgaaggatgcatagcaaattgaggctaattcattagtgtaacaccagaacaaggctgcaacatggtattaaccaagggcatttaaacaaactctttgtcgcacagcatggctcgaatggtaatcaccgggatcaaatccatggtattgattctcgaatccagtacctttcaacacttgcactgttgcgaagtctgcagcaagcccgatttcacgttgctaaaagatagtataaagtgtcgcaagatatcccaaaatagaaaacaataagactcaagccggggatccacattaactaggatatcgattttcccaaagctaggaggtttcgcttgaaagtgagcagtcgtttcttcagacaaagcaagtcatatcggacgcgtaacataggcccgtgcggttatatctgcaacgggaagatctgacgggccgaagacgcatacgcatattgtgcgctctgcgcgctgtgcatacgaaatatcctttcatgccgattgaaccatggagtatgagtattactagttacggagtacgaggaaaatcaggtttaagtcatcaatgtcacgagaccgtagaccgacgcgcacggtccctcatgttgttttgggtctggatcctccgcaagaaaactgaccaatcgcagctgagagcctccttccccactccagtagtcgcggaggttagcgcaaagaagattcgtcctcggcaattgagacatgtcggttccttatggagggcgaaagtatattgtacatactccggatatagacggcgccactctagccacccgagccactcgagccacctgaggttgttaatttcaatggggaagaaaaagagagtagaccaaaagctgagatttgaaatcggaaatgatcgtctagttctattgtgtagatcccatttaattcccagtcactaaaattggaacgaaaaagcccaaaagttcacgtgtggcggttccaagggttccctttctcggcttagcttggcataggggcaaacctttatgctggggatagctctggagttttctttcctcctgtctactcatactattctcattattataatataacggcattgctggacgttcgcttagcttcaatttccgccttgagtcttcgacctcgtcatcggaaacttctttgaaacttccaagttacatccgccattcttcggcaaacgaaatcgcgatcagagcctcccacagatctcaatctcctcaggcccaaaccctcgatccctttcattcggcattgacctcgttggcgcaaatggtctgctcggactagcaaaactatgatggctataccggggttctcaccaagcggggcatgaaacattttctggtctttccaataccaacattgaatatatctcccacccaggctggttgagtcggcgaccatgacagacctatcacaataccccgacggcctgcatggttaccgtagccataaattggcggtgcggacattgatgattgtctttacctccatcgcattctataacgccatcgaattgctcatattgttatttttcaccttcactcgttatcgcggactctacttttggacgcttttgctctcggtagtcctcggagtgatccctcacgccgttggccatctcctcgcgtttttttcactggccccattatggctctcgttgactctctccactattggcttctacgtcatggtcccaggtcaatcgctggtgctatactctcgccttcatttggtggtcaataacaacaacgtgcttcggtttgttctttggctgattatcatcgacgcgatcattctcttgatcccaacgactattcttacctactctaccgcacacattgcaaatccggcaattattcggggatacaatgtcatggagcggatgcaactggcctggttctgcgcccaagagattgtcatttcgggaatttacatcatcgagaccgcgaagctactcagaatgatgccagacaaggaccggcgccggtccagaatcctatatgagttgctggctatcaatttcgtcattatattgctcgatatttgtttactcctcgtggaatacattgggttttactcgttacagaccactttgaaggccatggtttacagcatcaagttgaagctcgagttcggtgtctggtgtgctcggaaagctagtcgatcttgtgcacaatcatcgatcgcaacccacttcgtccgaacacgaagaataccctggcttcgtcgatccttcccagattacaacggatgtcacccatgcagccccacgggaattgcgaccggggggacggagaggctggaatacaatatctgtggagagcttgcccaattctgagcgcgacactcgtccatctacccagtcgactggcaagagcctgcatccatcttgaggttggactagtgatcaattgtctaccactcagaccaatggtcgaaataaaacgaaatcaagcaggagcaggccgtggttgcttactccaaccgcctttctgcttttacgtatggcgatgggtgatggtatcttcgtttgcttttcacaagaaaagtacctcgacaaatcttcgaaagcaacccatgatcccgcccattggaattaaaattccctggtttcatcacgcttgcgcagcgagccgttttcgcacctccggcgcatcaatcaaatgcccatcgttccttacatcccagcgagattcgaacagccttgctgtcaattcctactgaatgtacgatatacctgtctatccaaaattcctccaggtccaccataggcctgcattgtttatatgtgccagatttatattggcaacaataattatttaacgccacgtccacgatttgttgattttcagccttatgatgtaattacttcaatgaaatattacgtcgccatgacatctcatcagacaccaaaaccagttggcaaatttttaaatttagacaaaagcgtctctttgtagtcaatgcagcatggaaaccaccgtctcgatttaccacggcccgtacgagtccatccctgacaacgcttcaccaggccttaaatttctaaaacgattcctaccagcactagactccctaacccccggcgaaaatgtgatcagccctttcttcacatccagcgcccccatcctcatcgccagcgatccaccaacaaccgcaagccaagcagtccctatcctcgaagtgcgcagccgacatacctccaaattccaccaccatgttgatctcgcctgggatatagaccttcgaggtgacacaggccccatcaatacgtcgtacagcaggactgctccaaacgcggacgccgcccaaaaaggacagctctatgctccgctagtagggaacatacagatgaagcgcacggttatgtttgaagcgacatcggaaacaaccttcagggaggatcccgaccagttcgcagttcgagtccgtgagttcaacatcctcgacttggaaggccgcgacgagtcggatctgcagattgttgagatgcgtatctttttggaccagagacctctccaggctcattctgcgagtctattcacgggctccggctattccggatcttaggctggagtactccgtatacgtagattggataaatgtaatgaaatttcatggatcgatgtgcttggcttctccactgcggaatcatctactaagccccaagttgaaccaacccccgcgcccccacttggaatgcttccatgtctttcttatctttggagatcatattcggcaagggattcctttcctggcggctttttgcctctttgccttataaggttgcattgcccagtgccggaagttgtagacgattcaaaaattttcacgagttaacaagacaagatgttggcagcacagaaacaagcagagatcatccacaatgtctctggggctttggataagtatgaatccaagctcagtgagatcaatctgaaggcgtgtatgatataggcaagcatattaaggctttattaacgatctatagatctggtccaaccccgaactttcattcagagagtatagcgcccacgacaacatctgcgaacttttcgagtcactcggggatggatacaaggttaacagaaaagcgtatggaattgaaacggcatttgaagtgatccatagccacggccagggtggacgtaccgttgccttcaacgcagaatacgatgcccttcccggcatgggacatgcatgcggacacaatctgatcgctacaagttcgatcgcggctttcctggccacgtgcgaaacaatgcgtagtctgtactccgatggaattggctattcggttcggcttctggggactccagccgaagagggtggtggtggaaagctgctcctcatcgacgcgggagcatacaaagatgtggacgcgtgcttcatggtgcatccattccccgtgcttcccggcgcctctgatcttctaagcgcgagttgctgcaccgggctgtatcttgcaaacgacaaggtgaaggtgacgttcacgggcaagccggcgcatgcgtcggctgctccgtggaagggtatcaatgcgctagatgctgtggtgtctgcgtatgtgaacatttcaatgctgcgacagcagatcttgccgacgcaaaagattcatggggttatttcgcgaggcggtgatagaccgaatgttattcctgcctctgcgacggttgaatactatattcgatcggagactgcgaagacattgaaaccattgaccgagagggtgctgaaatgctttgaggctgctgcgattgctactggctgcacggtggaatacgaatggtatgagaattggcgatggtctattttgatacgcttcgctaacgcatctgtcagggaggcctcgtacaaggacatgaagagcaataagcccatctgtgacagctacgtctctgctatgaatgctatgggccacaaaactatcttcgatgccgcgcagcaggcaggggggcttagtggagggtcaaccgatatgggtgagtgttccagatcctcacagtttgacctgaggctgagccactccaatctaggcaacgtttcatacgaagtacctggcttccacggtggattcttcattcacgccgatggagttaaccatacgccgcaatttaccgccggagccggatccgaggatgggttcaagcgtagtttgcaatgtgcagcggggatggctgtggtggcgtgtagagccttggtcgatgcaagtttcgccactgccatcaagtcggactttgagaagagtctggaattgtaaatactagcttgcatttagcgttctctcgtatttcttgtgggatctttcgaaattcaagtacaagggtatgacccgtgctcattgacaacttaccctatttgtacaatgacgattcggcaattgtcgcagatagagtgtgtgccgatcgacagtggatacaactgccggacttggcctccactgagggggaagcggatgttcccccaaattgcctccgtcatgactttgacaccatgaaagtggggtgccgaggaagatttattcttcgcggattaacttcgcggggaaattccggtaacctcttaccaacgccgagaccgactgcaagtgtataaaatcctcctttggtgtgagaagtgttgcaatctcggttgcgatcggtcaccgtcggccatcagccacgggcacagggcttgatgctgccggctgagtcttccctaatccgtcgatagtcttggctgatcccatacttcttttgaatctatccaaacccccggaaatggatccaacgcgattcgcccataatgtacctgttctatttctgtatcgctatgcgaggagagaactgcatcgactagccgataattcgtattctaaacatccacaggcctggcgaatgtgataccggtggttcgtttgcctctcactaaacccgtggacgctccgatggcttgagaaaacaaagagaaccgctcgtgtccgtccactgtcactttatctcgcacttcatttcattttttgtttattattcccttcctctgtgcatgttctggacctcggcgaacaccgaccctattttccccctctttcgaataattccccctatcagatatccaagaggcggtcatagctttgacggatatgacgagtctctttgttatagctgcatgatctgttttctatatgcagaagcccggtgcacgtgttggatctgttggtctttttttcctctgggaagttgtcctgctttcattggaaaaatatgcaaatctttcgtcgactcgatgtatcattatgactgcgcacaaacttttcaaaacacagacattaatagaaagtaacacatataacaataaaaacaagcatgtctatagcgacaggggtataaaatgaaaaaagctggccgcccagtgatgattcgactatagccagtcgaagttcatcttgcagtatacatcacgtatggaaaattatgtccctaacaagttattaacatctgttcttacttcgggcgctcgattaatgccatttcaatcgaagactgcgtatcggatgagggcagccgaggccgagcatttgcccgtgactcaacaatgtccatagttgacattgtctggcgcatggcctcgtgaaaatcgtagattccgctgcgcgctgaatgctgttccgggctcgccgttctcccagcagtgccagcactggagctagcttgcgcctcagtatcctgtgacgggagactgtttgcgagcatgtcgaagagattgatgtcggtcgaacgacgagcattgccattagccccttggcaaaaggcgcatgggtaagtgcgtgtcagctcgcggagctgcgtaagggcgtggaattcgagtttcagcttgatactgtaggcgactgtcttgaagctgatgacgatgtagtgcactttgtactcggcgaggaggatcaatacgttgagcaggatgccgaagagattaacgaagagtattcggtagatgattcttcggccctgcggtccttttgattcgaagacgggcttgagcgctcggagtgcctcgcggacgtagatggcacagattattgtatcttggatggcgaatccggttgcctgtaaacgatcgtagattcccgatacggggccgcatggtatattgccaacgttgagaccgaaaaggacggccatgggaatatggaggatgaagaaattggttatgatcatccataatacccatcgtacatggcggatatcggccacgacgaggtgcagtctggaatatagcacgagcgcttgtccagtcaccatgcagatccagcccaccataaaagggactgacatggcaatggcagaggcttgttgtgtatagcgaatttgagctggtatggcatgtaacaatatcccccaggccgcgacttgcatgctccagaagtatagcccgcgatactttttgaacctttcgaatatgcaaatcacaacttccaacgagttccacgctccgatcgagaacatagctatgacctggacgatcgtgaagttggtatttaaaatgaggctcacctccacagggaggttgctcattgaggtgtccatagcgtgtgaatcggtttggccatgtggataaatcagccggcgggaaagaaaaaatatatattggtcacagctcggacaaatgccccatctagctgacatacaccattataatggagacttccctcgagcgcctcatcctgggccacggggtgggacgggataaggttgactgctggtgtagaaggtggatcatgtcactggcgagtcatgcccttcgcataaatgagagagaaagcaccaatgcagtctatgatgctagcccacggggatctggggcagatgttccggttcattagacagtcaatgaaattctgaatgggctattggtagcaatgatatgaagatcccagttttccctcccccttaatcatgttggttggagagcttattggacacagcaaacgaagggacaaaagtcgagaggctatcggcgcgccaaacagggattctcgggatctcaaacaaagaaacccagccagaagtcgtgcactgatcacatttctttcgctagtggcgcaccgaaatgggagcccagacctcccatcgaggcattcaggcattggtaatgacgattgaatgaagagatatggagtactccatacggagtagagaggaagagaagaagagaagaatagggatggattgacgtcgacgttgaggcttggcgcccgttggactcggagctctcctgacaagaagtggccagagcggagtactttgtgcacaatgaagtgttgtctttgaagtaatccgtattcgtatagaaatataacaataagcatggagtatagattgaccgcttcaatattcaacgtatccaatatatacagatcggtgaaaggtgacacgtacatggaacttatccaaaagctcaagcgctgtgctacgaagaagagatagtacagagtagagaatgtgtacattaatagattggataccgctaagccatgtaccccttattggacatgtaatttgaaaaatcgtgtcatgtcaaatccctcctgaatccctttgaatttatttccgatcaacctccagttctgggtaatcagggagtttccagtccccatccctatcgcttaagaaccgtgacaacagttgcggtatgcgaaggaaacaagctagtcctagaatgagatgcagaagtgaaatttcccattgtgagttggggattgcccatcggagcaatccagtgttgaatggctgaaccaggtcgatgaaaggtcgcattttctgatggtagttttgaaaggcctgggacaaatcttcactgcgagcaagctctccagccaggatatatgccccaaccagaccactacttgtccccattccactcaagggagaaggacagtatgccgcatcccctagaaggacaacccgaccggagtgccaggtatctgtcttgatttggacgacattctggcagaaccagttctctgtagtgtccatcccttcaataaaccgatcggcctgccaccccgcgtcgcgaaacctttcggcccaaaactgtttttgctgcccaactgaacgtttcgggatattccgaagttcttccgagtcagatctaagcgtgaagtagacttgggtttccgcttgattgtggcttctggtcaggatcatccggccgcccgggcagaggtacgacttgcacatattgctgtcagtttcaatccgtggaacaaaccagtacgccatgtgtacaccgagctggtgatattcgttcggggcatcggggggtagaatgtgctttcgaatttgcgagccctgcccgtctgctccaaccagtagatcaaatgtatccgaagagccgtcggaaaaggttgcgactaccccttggtcattttgcgcgaagccatccaccgtttggccgaatatatatttcactttgtcttttgttgcgtcgtaaagtatgcgcacgagatccccgcgcatgatctcatactcggatgtcatagactgtgcacccttgccagacttattggcgaggactttccccctgacattgcccttcgcgtcaatgaaggagacgcctgcttcgtcgacgagcttttcgcgaacggcgtccatgagacccatgcgtttgacggcctcgatgccttgtccgcggaggtcgatctgggcacctgtcgctcttagcactggggaccgttcgacgataacaacttggtgaccatttcggacgagccagaaggccaaagctggacctgcgacacctccgccacaaatgaggactttcagagccattctgtagagattatctaggagagagttagaagaaacaaattctctgtgtaatcagcagtctggatttgaattttaggggtagtaagccggcctcgcacaattcggatataaagggcaattgctccttttcgctgtatataccggtttgtcatagtgggtcatgactctgcatcggaggcatctcataggcaactattttggggctgcggaggcccgtggctgaaaatcaaggaacgggagtttcaccagtacgttgagtatttgaatcatccatagaaaaaaaaccaagaagttaatgcatgatagagctaagtaacactacaaaaaatgatatgtaatcgacaaattattcacaggcgcggacggccggtcacagggaaacaagggatatcataacggtccaaattcataaccttggcccaggcagcaacaaagtccttcttaaacttatcctgggcatcggagctggcgtacagctcagaaagagcacggagctcagcgtggtgaccgaagatcaggtcaacacgggtggcagaccacttcttggcaccggtcttgcggtcgaaaccttcaaactgctcactgtcagcgccggttggcttccagacagtgctcatgtcgagcaaattgacgaaaaagtcgttgctcagctggccagggcgggaggtgaagacaccgtggtttgatccgtcccagttggcgttcagagaacgcagaccaccaaccagaacggtcagttcaggggcggagagggtcagctgctgcgccttgtcgatcaggagctgctcggtgcggacacgacgagtcgagtggccgtagttacggaaaccatcggcgaacggccgcagccagccgaatgactcgacatctgtttgctcctgggtggcatcgttgcggccaggggtgaagggaacgggaatacccgcggatctttcaagggcggcagatccagcaagcacaatcaggtcagctactgagacgcgcttttcgccgttctgggcactgttgaagcggctttggatgttctccaacagactgaggacttcctgcaactgcgctggattgttgacatcccagtccttctggggagcgagacggatgtgggcaccgttcgcacctccacgcttgtcaccaccccggaaggtagaagccgatgcccaggcagtggcaatcaacttggtgggctcaataccggtcgagagaatctcgttcttcagcgcaatgatgtcgccattgtcaatcagagcgtaagtgggagcaggaatgggatcctcccagagagaaacctccttagggatctcaggacccagccagcgagcgcgaggtcccatatcacggtgcagcagcttgaaccacgcacgggcgaatacatcggcgagctcatcagggttcgcaaggaaacgacgggcaatcttctcgtaggcgggatcgaaccgcagagaaagatcagtggtcagcatctgaggcttgtgcttctttgagtcaaaggcattgggaacgatatcgcccgcattcttggcgacccactggttagcaccagcgggactcttggtcaactcccagtcgaacttgaacagatattccaagaagttgttactccacttggtaggagtacttgtccaggtcacctccaatccactggtgatagcattagggcctacaccggagccgtgcttgttgtgccatcccaggccctgtgactcaatgccagcagcttcgggctcgtctccgacattatcagcaggggctgcaccgtgtgtttttccgaaagtatgaccaccagcaatcaacgcgacggtttcttcgtcattcatagccatacgagcgaatgtgatacgaatatctctggcagcagcgacagggtcagggtttccatcaggaccttcggggttgacataaatcaaacccatgacgaccgcggccagcgggtcctcgagatcgcgagttttgatatcgctctgtttagcctcctcctctggggtctcggcctcatagcgagcttcattagtaaaccagacgttctcacttccccagtacaccgactcatcggcttcccagacgtcaggacgacctccagcaaatccaaatgtcttgaaacccatagattccaaggcgacgttgccagttagaaggaaaagatcggcccacgagattttggtaccgtactaagtacaagagttagtattgattgagaaactagaagtatagaagtgtatagttctcaccttctgcttgatgggccaaagcaatcgacgggccttatctggaaatgaaagatacatatcagcatgatatagatgtcaactcaactattaatggaactcaccaagggaaacattatcgggccaagagttcaatggtgcgaaacgctgctggccctggccaccaccaccgcgtccatcgaaaactctgtatgttccagcgctatgccaggccattcggatgaaaagaccaccatagtgaccaaagtcagcgggccagaactcttgagagtcggtcataagggcgtgtagatccttcttgaggccccaataatcaagggtcttgaaagcagcggcataatcaaagtccttattttgaggattggtagcatcagtatgctgacggagaatattcagcttcaaggcattaggccaccagtcagtgttcctagatgagatcagtatgttgaagcggtatatcaaatgtgccgaggcagaatcacgggagaactagggaccataccgggtaccacctccagcaacattgctcttcttgtgcgcaacaggacattcacccatgatggcagttggtatgataaagaaaacgggaaatctgaagagaaagaaaagtgtcgggaacaggatgcccccgcagtttaaatggtacaggctgtggatccaatggcgggtcacgtattaagcagctcccatgtttagtgcagattccctcgatatgctagtttaaagggaaatcatacgaagatgacgtgaatttatctttcttgaatttatcattggccatgcagcgacaaaatccggggcgtgcggggaaagccataacagtccctcacgaagagatcaggaactcattggcggaatgcgccgaagagcgccggattccgattcgacccaatatataatgagctgacaaaatggccatttctagatgctggaggttgtttgtagatatgagaaatgttgaatcggagaatctttgcagtctggccctatgatctgactaatgataattagttggagccgggccctgataatcgcccaccggtctatgttgtatgtacggagtacggagcacggagcacggagcatatactccgaaaatcaatgtatgaccctttttcctttttgattcacatatagaattagtggtctagtagtacataattcgaaattctccttgaacggtccactgatccagagaaatccttgttcggatcatggtttatccgagccaaatagggcggtgtgttccagcttcggaagcgattgcctaatacagactagcgtaaatatacaactctaaccagctctgataaactgcattcatcgtcctattctttgatagctttactcactggctggttagataataatatagcctcacctatctcttgttcttccctttcatatcttctagcaatagaaacctacgtcacgtctatcattcttctctacggcaagctggcagaaacagttcaaacccacccaaacatcaactacataatccgtgatttatcaataaaagtgctctagtattgaatatcctaccaatgaatttaaaagcttaataattgtttgaactatgggccatcactgcaacaggaagctagcaggatgatgcttcacaatgagcgcaatgtctcatacatttcggcaataggaactcacccaagctagcaagattcaagaaataacgggcttggtacccatcctcccacacgagactctcaatcagcaaaacttgtgaatttcttgaagacctctacattggccttcatttcatttcttactggcaaaacgcctgtcgctattagaattgtccatatattccggcacttttccttttttgatatcccctgtgatacacttggaaaggatgtgaccgtctatcagtgtgaggcctagcggtctgatcaggcgttacttactatgggatcaacaagatctatatcgcggctaacgtttgatcagactatagcggccaatcaggcgttagtatcaggaaggtacatgactatacaatggcgtcgccgcgacgatgcgattaatctagtctcttctaggaacctatatgcattcacctcaaacggtcttcttccttttgatcctcttcttattcatcccatcatctacattcacggccttcagccactacttcgttacaatcttttatcatctgctatcatggcagctaatgccaccagccataatggccttcctagtcacttctctttccgccaaggtatttccgtcatcaagatggaactccacatgacacctgaagctgctcagcgctactcggatctgtggaatatgcttgctgctcgccagctgccttctgagcaccttggcctgatcatgaccgtggtgaccctggcaagacttcattcctcctttgccaacaatatagtcgcctgcacccttgtcaggacattcgtcgagtcgaagcaaattgccgggcttcgcgctgcccttcctcgcctgccggacgaacttgcggctgtcattcctaatctctttcaagaatccactcatgccatcacgatgttgccggccatgcctgccgaattctccgagatcttttccctctctgcaaacgatgaaactgccctccgccgggagcttatccacctggaaccgaagttgaagcctgcgatctccatctcggacgatgagttcaacatcattgtcaataatcttcccgacttgccgcctagcatgagtggtacctggaaaattccgctcgaagtgttgtccactatgatcaaggagaaccaaggtctctccgacaagcttggtattttctggaatgtcctctcataccaggattggttcgcggtttacaatgccaccagcttctttgagggccttaccaagtttgccacagccatcgcagccctggatggcaacgagtcccaggtgtattgggatttctattgccactttctccgagtgattgtggctaggcccctcgcctagatgcaggattcactgcattgtctaagcagcggtcgttttcttttgcgtcctctcttgtttcatgagaccgttgcttcccattcagaagagcactagccagctctcactacgaattcagatttctttcactcataacatctcacatcttcttattcgtaactcatcatatgcacataaatttgatatgcccatcccgcaaaatatcaggccagctaaatgttcctccagacaagctcacctcgtcccttttggtccatatcgtctcaaatatatgtttagccaccgatgcatgaaccaaggctgttgtccgagcgcaattatcaaaccatgacgagaagaacacctgtaactcaggactaacagcctcacaagcagtgatgaaagccggccatatcagagcagcattatgactacccttctgatcaatttcctcttgttgaatttggattagatagccccggatggcattgacattgccctgaagcatttcaggatcaatttcgtatattcggcggtgaaagaaaatagataatgctgtgtacatcgcatgagatgttgtagtcatcaccactggaagagctccattataaggctgagcatagcttggattcgcagccggtagcaaatgggcaatagctctttccagaccctttgctcgagtccaaaattccttgagactgagcctactttgtcctgcatcagacattatcgacaagtctcgctcattggcaaggcggatcacttgggagagtagcatgaggaatatctcatcgattccgtatagcgtgggaaacagtgttgagctccatcggccgggtatcgcaaggtggaggtcacgctgggctatcccggggtccttttccatgctcattgtggttgtggaaaagactaaattggggtagatacgaaaacctcctccatatgtagtgttgtcgttcaaagtaccacttgccccagtctgattcatgctcaatctatcagcaatgcatgttgtctcggccataatgcgcatgtaagcataacagtggtgcaatgctctcttgttgcctgatagcgctggctgactgagccccttgatgcaaatgagtttctccgtttggacgagataggcgcgtcgcatttctgggtccccttttatcatctgtattagagagaatgttagccatgtacagtgaattcacattgaggccatacaaaagcatttgaaagactcagcattgccatcaaaatctccttatatttgctcattttcgtcgctgaaatacagctttcttccatacatcgttggaaatggtattgagcctgtgccaagtatctcgctgctgatgatttccattgctgaacgtaagccattgaattatttcccaagtgaaaggcacttgtgctccatacggcatttaatagggcaagccgtgcatgattgggagacccattaagcatgaggtctgccaatgttgccattgcgcatggtattaccaggctcatccaaggtgtttcctttccatggcacaaaggagagatcaacggcacaattctttctttgtagtgggataagagattccagccctcgatattgcccacggataagtagggattgagttctgcttgtagactcggttcgtggaagtccatcccaacgctctgaagtggctcttgattcggccctgctagcattacatcgtcactgtagtctgcatctagggcatctggactgaacggggtctggttcaagtcttcctctcttggcagctcctcgagctgctcaaaccagtcacccgaggaaggctgagtatctgtaccaaaaggtaacgggtcaatcgggagtgattctgggtatctgaaagcaccaaagggtccccgaaagagcgataatggtttcgagcaactgatatccgagtcgaatatttctagatcgacgattgcctggtcgggattctgatcgggcacggaggagatgagctcaagggtcatgtctcggcgttcaacatctgccaaagattgtcagaataagccgatgatagttgcattcaaaggcggacctgtgaagatcgagtggcggtgcctggctgcattccccgcattcaaccatcgaatatcctccttgtcatgaataaaggttaactgtacgatttctcgcatcttgagggctgttgttatttcttggggaagttgtagttcccacaaaggactcggagtctccgttggggataaagcccaaattggaatgtgattccgatatcgacatggtaggtatcaactccccggtctaaccgaatgacaatttattcattctataagaagtaccaagctatttaaagcgccgtctgcattatacttatgttcaatcttctgggtcgcaaaaatcagtagttggatctgagagacctaatatcgctcggaacttcttaccctcttgggctattcccttctcacgttgagtcttgatagtcattttccaacgttatcttaagctgcaactaaagattacagacttaaatactgctgcttcggattccaagttatacatgcaagacgcactagcacgttcactcggaaagacaagcattattctacaaatcgtctatacacatgtagtggaggtttgataacaatccggcattgaatctgcagggtaacttaagtacataagtatggctagacgatgcatcccgaggtctgactctggatgactgtttaggaaaacaatttggcgattcgcagattgttgtagtgccaggccgtaatgtcctcatatttgcacggggtatcgggcgtgataaacttcttcaagggaagcaaggaagcgatacggttcggcttcgcaaaataggcaacagaatagcgctcggggatcatcatatcaaggccaattttgacagtgggcggataggttacccggtgacatgcagccctgaatgtatcattggtcaggcgctgaagagagtcgccgatgttcagaatgatctcggactttccccctgagatgacatcatggaacttccccagattttgctggtcttcgacctgtaagccaccagtggaatcttgaaacagcatggtaattgttccaaagtcggtatgttctgcaatgcgcgtggcagttccatcttctagagcagatgcagggacagctggataatgaagcagacggaattcgttttcagccttgttgtgcagtagtttgagatctgatgccgaaatatcgagggccttagccaacgcatcgaggatctctaattcgacgttgaagcagctttcatagaagtcttccatgaattttcggaacccgggcagtttctcatcagctacccagatgttgtccacaaggctgtcgtgtgaggaacccatgtcgagggtttcctgttctcgttagaatggatgttcacggcggatcatgcaggaagcacccaccttgatatcccgaacagacttcccttgagggaggcctttatcatagccactaatggaagagactgattcttggccgatataactgtatccacggttggggtttgcctcgggtgggtgtttggcggtcatcttatcctctagtgagagagagaagaattgacgggtctagtagagacagtcaatatgtgtataatcacctcgtttgtgtcaacttacatagtcaaacattttcgcaatcagattttctgggagcccatggtttttgagcttggccactccgcgcgttttgagtgtttctagtagggctgccgaaaccgcctctctttccgcgggagaccctttcaacagggacagatcaagagcttgggacataattatgaagatattcttggaattatcgtctgttatgagggtcttcttgactttcgaatcaagaatgacaatgaaatgagtaaaagaagagacctacaacactagactatatatattcgatcacggataggacctacaagtggtaggtggccaagaagaacttcattgggaaggtaatattgaagatatgaacacacagacctgtaaattatggattaccttccattctatcttcatctttcatgatgcgaagtgtttgttccgaagatagtgtaacgcacgccaagattacgccaacaacgcgtcccccaataaggaaaacaaaatagtggatcaccttcctagtatttcatttttcaagtacaacatacaacatagagataggaaagtgctgtcgccttatctcggggactgtagaagtgtagaggtatttcatattacttgcctacgacagctaaaatttcatcccttggatctcggtgtactgttgaggaccactatcactttcctcttgccgttccaacttcatgaacggctgtgtaatctcgaggctgcggagagcgagtgtccgaaagtaggagtaaaagttcatgtaggcccatttgacgaagcctccctcaaggacattcacctgctgctgaaacaagacaataactgaattgtagctcaaggcattttcaagagcaatgcgatcttcgtcaccttgattcctagaatcaaaaaactaagtcttgggctcaatgtttgcataaggtctcggataacagtggcttcagatggtgaaatattatgttggaccattttaacagccatatggttgtgacgccacctctgatacatagtttccattataccgactgccgtgaatagctcccaatatttgggaggcgattcaacggccgttagctcagtccaaagtgtcttgaaagtaagcgagttgtcggaatcgcgaactggtcggtcatggcttatcccaactaccgtttccgccctagccggtgatgggtgcaaagagatttggagcgaatcttgaatttcattaccgctgtctggctttttgcgcttgcggcaggttttgtttgtgtgaatcggcatattcccccacttaattccaatgaagttgataaaatcattggttttgaattcggcatctggggacaacttgttcttccaggctgtggaaagccattggccccgttgaattgcttcattcatgttggtggcgtcggcgccgggaccaataagacgttgaagccaaagagaagacccatcttctggtatgcagatacgctctgccctgcaagcacaagacaatatcccaaacatcactgcaacccctgagtaagatcccgtagcaccggtaagcaagtatccatagaatctccatcaaattagaatggcggagaaatatcctttttggttcatactcgatcaactggaaattgaggacatcaaaagtcttcacgtgagacgatgcgaccaccagaccagcttgaaaaaatggctgtccacctgcggggtaactgtcggccagcaaccatccagcatcattgtatccccccgtgaagacatatacacctttccacgcgacaagcgtccgctgattgttctagtagaagtcagcagtgggtaatttcgggactcgttctttgcgtacatcccctcggtcgtctaagtcataggctaggtgttggatgcgataacccgcaggcaaggtcaaaagggcatagatgacacctgcatccgacaagcggacgttcttgggattccacttgcactggttgatgtccacgcccacttctgcttcaatagatttgcgatcggggggatttgtaactttccaggtacggagggaggccaggtcttcctggcttgacagaatgcctgggttgaatccagggacatcgccctctttccattcgactgggttgctgcatttattctccaactcccgctgaacccatatttggcacctctgacgcaattgcgacaggtccttcagccagtcctcaatgtttcttgtggaagggcatgccatctcacaagcccggggcggggagatagatggcaccgatacagatgttagttgatgggtggtttgtaattggagatgttcccccaggtattgctgcttccaaaagggagaggtcaaaacaggtagaagactgctgtgaattggaaccagaaaccttcatagacaacgaaggagaaagtgagacgttgatgaggacgaatactgtcttttttagtgaggatatgagaagtatagagagtcacagagagagagaactaatcagatgtttgaagtgtgctttgttgacgaagtatacaacgcccaaaagggaatcgggcaggcctcgacggtcattggaccaaagctgcgcgatggccgctgcgggatgccgtagccccccaccaacaaacagcttcctgcgcatcacttcattcctctcctcacactttttatttcttttctgctttttttattttctgtaatacactgagcgttccattttttaaagtcttttcgagactccgtacttgtcatggattccacgggtctgggtagtgatggtgctgcctaccggtctcgtgggtaccaactcgaaatgttagaggccagccgcaaggaaaatatcattgttgcggtatgtttttctcttcggtgagggcttagaaaatgctgacgattgatagatggatacagggagtggaaagactcatatgtatgtttggaggtgacgcttcctttatcggcacatttccctgacagttgcttcagtgccattcttcggattatagatgagcttgaaaacgccagttctccagacaaagtgaacaaactcgtcaatttgtatatctattcttggctcacatatgtcacagcttatttggtttcttgccccgacagtggcattgagccttcaacaacatcaagttatcactagccacatcctctctgtgaaaactaaagttttaacgggcctagataatgttgatcgatggactgatcaaggtatctgggataaggtgctcaaggatgtccgtgtggttgtctccacatatgctgtccttgctgatgctctgggtcatggttttgtccgcatgccccggcttgctctacttatctttgatgagggtacatacgtggcacatctcaaggtattccagaattaaaccaatctaacatctaatttagctcatcattgcacgagacgtcatccggcgaacaagattatgcaaaatcactaccatcctactctactgaggtcaggcccaaatgctgtgcctcggatcttgggactcactgctagcccagtggtccgttcgacccaaaatgagcttgagtcggtccatctactacatgatgataatcatctccagcaactgaccatgttccccctagaacgatcgaatccaacttgaacgcagtatgcaagactccacgtgtccatcgtaccgagctgttggaaaacacccatcgccctcatctcgagcgtctcaattacatacactttgatgaagcacagtatggccttggaagtcgactacttccatctctcatagaatgttgcagggcctataacatagatgatgacccttggatcgaatcattacggttaaaggatcagattgtggagctggcgaaggccctaaatacaggtaaaaccttctgtagcgagcaactgaggatgttcgaagcacgcagccgtcacatttatgaggagctggggggttgggctgccgactttttcatcagtgcttcaattgatcaacttcaactttcaatccaagatgctagtgaaatgtcacatttggaccaaagagagagaatttatcttttggaactgctgcttacgatgcctacgccagttgcagccgaggagaataatcacgtatccatcaagcttgaaatgcttctcaactatctcgaaaaaatggataggcctggcttttccgggctactattcgtcaagcagagagcgactgttagtgtgttagcgcgcattttatcccttcatcccaaaaccagagatcgcttccagtgtgccgcttacgttggttgggcgagtgataaaaatcgcaagggctgtctcggtgacttacttcatcgggacatgcaacgaaatactctcgatgaattcaaagctggccgaaaaaacctcattgtcgccactgatgttctcgaagaagggattgacgtaagcgcatgcagtctggtcatttgttatgacaagcctgcaaacctcaagtcctttgtccagcgtcgtgggcgtgctcgtcatagagaatctacatatgcggtcatgatctcaaatgaggacgagctgttgagtctccaaaaatggcaggaactagagcaagccatgattaaagcgtaccaggatgatgagcgacagcgtcgtgaagcttatgccatcgaagataccgaggagcacgtgaatgagacactttgggtggaaaaaacgaggtgagagcgatccagtgcttccccttgatattggctgacatcatttggccagtgctctgttgacagcagatgatgcattgcagcatttgcatcacttttgcgctgttttaccagttgatgagtattccgacaatcgaccaatgttttccttccaagagaatagtgtaggtttgcttttaggaacggtcacgctaccaaattcggtgcatccgacggttcgccggacaacggggaaagcctggtggcgcacagagcgagcagccagaaaggagactgcatttcaagcttacaaagccttgtattcgtatgggttgctcaatgacaatctcttaccactaacaagaaaaccagagttgcggttctcggaacagatgacgctcccatctattgtacaagctgctgagcagtatgacccttatgtagaacttgcacaaggttgggcttcgggtcagctgtgtcagacacgcttgaacatatgcagcaatggttctcccgataaagatctggccgtatgtttgattttgccaagattgacccccatgccacaccccattcccctctactggaaccccgagacttccttggaactctactttgatccgcaagtgtcgactttcgaggcgacagtggagacactcgaatatatgagaaagaccacggccctctatctacaagcccccagctcgcgccagcggggcgaagaacgcgacttcgtggctctcttcattcccgatattccacatgaatacttgggacaatggcttgcggtgcacgaaggaaaggagcctgcactggaagtttactcgaggaatccaactacgccgcctacgggtatcgtccgtgaccagtccaaattcagtgagccacggatattcaacaggtgggtcgttccggccgaggtgacaaagacgtcgcctattgaagtggaatgttcatcacttcctcgccgacgaaatctcctccaggtacgaaccatcaatatcactggagatggagaggtagatgcaccaaagaagtcccacgttctacctgcagctgcttgcgtcatcgacaagctccccgcgaaacaggctgtgtttggactgttcatctctgccattttggaccggctggaggcatccttggtcgcacaccgattgaatgataccattttgaaaggagttggcatccaaaacatagaccatgtgattacagctatcagcgcccccattgcgcaggctagtaccaactatcagagatatgagttctttggtgactctgttcttaaattcaccgttagttgccaactatttttccggaaccccaagtggcacgaggggtacctctcggagagccgtgacaaactcatccaaaactctcggcttgctcgtgcagctctcgatactggcattgactgctttgttctaacaagtcggtttaccccccggaaatgggctgcaccattgatcaggaacaagttggacccctcgactgctaagaggaagatgtcaagcaaggtcctggcagatgttgtggaatccctcattggcgcagcatatgtagacggtggaattcggaaagcgcaggcctgtctccatcgcttcttgccagagatcgatctcttcacgaatgagatttcgtccctcctccccccacccgggaaaggagtgagtaacttaatcaaccatcaccgattggctggtctgatcgggtacacttttagtgaccctgccatactgacagaggcactcacccacgcatcctgcgagtacgatacatcaacacaatcttaccaacgcctcgagttcctcggagatgccgtcctggacatggtggtcatggcagtgatagcagcccaccccgtggaaatggaccagggaccaatgacattgctcaaacattcggtcgtgaatgccaacctcctcgccttcttctgcatggagctaagcgcaccagacgaaccttcccacatcacacaatttgccaacggcgaagtcaaccttgtgccacactataaccagatccacctctggcgcttcctccgctcccatgggcctaacatcacatctgcccgggaagcttgtctcgagcggcaccagggtctccgtgctgagatcttagatgccctgaggaacgaaagacaatacccgtgggaattgttcgcccgcctgcgtgcggataaattcttatcggatatcgtcgagagtgttcttggggcgattttcatcgactgcgggggcaatttggatgtgtgttacgcgttcgttgaacgtatcggtctggtgtggtacatccagcgtgttatcgctgacggggttgatgttgttcatccgcggaacaccgcgcagaacatggtgaagggagcaggaaccttggtcttcaagaggaagagggtcgaatctggaggcgtgggtacgtatcggtgcacagcagtggtcaacgacaccgagatcgcgctggtggagggttgcgcttctgccgaagaggctgaggtcaaggttgccaacattgctattgagtacttgacattgcacccattggcttctacatgatgtcgaaacgacgacttgggaaattgacgtgctcttgaatgaattttggatattttcgattttgcttggatagataccatttgagaagtcttgaattttgacagccttcggtgaaatcgtaagctatgtagctaattgacatgcccaaataaataaagtagtaaaatatggtcgactcctatgccttgtctcccttcgcaccgcgcttagaccgccgcacaggggcgggcttaggttcctcttctgtctggtcctccgcgtcagatccaatggagtccacttgttcctcctcacttgaagtcaccatcacaccctcttccgtactctcggaggaatgggtatccacgtcagccttcgacacaggctcccatgtcccctcagctgacccagtatcctgacgcaaactgctaaggatctttgttgtctcactttccacgccattccaagctccacagctgcaacaccgccagcggcccagctcttccggtgttttgatcccagggggagcctggccgttgacgagccgacacgcgctgcagatcatcgccatccggttgcggggttgggtttcatcctctcccagcagcacatccaagacacggtcataccaatttggttgttcagtgtattcgctgttctgagggaatgcgttcggtgcaaagctgggttgattggtgggtggttggggagagaaagaaggtggggaagacgactgctgcggtgtttgcggggcccgaggtagctcgagagggggagagggataattgggggatggcgggctgttctgcgatgccgagggaggacggcgaatgttggcagtgggtggcggcgggagaccagtgcgaggcacattctgtagctgctgtgcgaactgccccttctcggtttgtctctttgggctcggggaggacctgggagactcaccaccgtacttctctagcagttgctgggtggagttgtacttggttgcgaccttgagcttttcgatggtctcctcgcgctggttttggaagtcatcaagacgacgttgcatgcgggagattcggtagtcgaagattctggagctgagagtgcgcacaccatatatcctgaagagacaagaatgtcagcgatatgggaacgtgcagaataaggaaagacgaacaggaccggcccgcctatgatggctgcatattccttgattccccagctctcccatcccagtacgagggcgagaattatagagtaaaacagataggcaaatgtcgagtagagcgtccacagagccttgattcgccgggaagactgacgttgctggtcgagtcgcgtggtggcttgggcgatcttggtcgacagcgtcgacagtgtcttctcaaaagaagctgcagaattcgtatcgccctgagtaatatcagcgacagtaaagcaagataatcaagtaccatatatctcaccttccagggccaaaaagaaaccattattctacatacatagtatgcctgtgaactgggaaggagaagctcgacagttccaaatttaggaaggcgatacgcacgggccacctcaggtcggctccaactttggggagtctactaggaagtccacctaaatagggggtcattggattttgtttatttgttacattgtgcatgagtatttcggatatcattacatagattccagctattcatttttgttgagttgccctttctatgactttccgagctcagcagaccgagcagtggcagcttggacagacttgtcgacgatctctttaaagtcgagagactcaaatgtctggagagcagcatatgtggtgccgttggggctagtaacgttcttacgcagctgagaagggctgtcagcgctctcaaccagcatcttgccagcaccaagacatgtctgtgtagccaaccgagtggcttgttcctcagggaggcccagagcagttgcacttgcgatcaagtgctcgaccatggcaaagaagtaggcgggtccagatcctgattgggtcagatcgatacttgttgatggccttttacgtaggagacttaccggacaatccagtgacaacatcgaggagttcttcgcggtccacccactcggtagccttgctaacacttccgagcatagcattgacaagatccttctcatctggggtaatgtcggcgccggcaaaagcacccgaagcaccctcaccaactagggcaggggtgttgggcatcacgcgaacagtgtgggcggtacggctatcgctcgttgtcaaccaccccttcaagctatcaagggtaatacccgcagcaatgctgacgacaacgggcaaagtcgcacgcggcgaccaggcaccaccgagctcctcgcacacactcttggcaacttgtggcttgaccgcaatgatgaccaaatcggcatcgcctccagcctcaacgttagaagtggtggtgcgcactccgagtgcggccatcttctcgcggttgacatcccacggctccgagacgcagatattctgcttgttgacccccttgctcagcaggccaccaatgatggcggaggccatgttgccaccgccaatgaaggccagtttgctctcttgaatggaaggcattgtatagatacagctgaaagggtgcccaggtgtcgtactgtccaagtgcgtagtcggggagtcccgcacttatgtaaaaatttggtggggcacctggacccgcgttatcgcaccggcccggtgttccaagcggttggagaagctgtctatcttttggtttctgtttttattactcattaggtttcttgaatactctttatcaccctcaatgaaaagagaaataatgcaaaatttacttgtagattggaaattaataacggggttggcttagagacactaaatggaattgaatgctttaactagctgttatggctcggttacaaatcatagtatctcaaaaaaagagaagacaaagcaaaatccaaaagctgaaaccgtcattcgtaactcgtgatagtatgtatacagggtatcaatcagtagacacgtcgtgcgtggcttccacgtccatcagtgccatgcatgcggcgggttccagcagcctagttttaagatgttagcccgagtccaagtcgaatacgagtcgtttggtccttaccttgactgcggggcgatgcgtcaagcttcctttcagcttcaacatagcgccggagaccttgtcgccaagtgagggtttgcgctgatggcgagtatgggtagattttccataggcgtttcgatgaccaaaacgactcccagtaggaccagtacgaccagtaggaccagtccggccagtatggccagtgtgatgatggccttgcatggggttctgcttcgttgtcgttatggttttgacggagcgcgagttcgcgtttcgccccttaagtctggtcatcagcgtaggctttgtggtgcgggtggttgtggtagccgggcgacgtcgatgaaacatggtgatggactgatggatgttgtatgtagtttaaatgtttgatatggaatgtataatgtatacaagtgtggtaggttggttgtatttgcagttaggtggaaatcgacgtctttaaatcagctgcagagatggccttgggatgacttgatgtcaagcaaaacgtacgccaagcgccatgtcgccttcaaagatagcatacaggagacgttgacaaagaggcgctcagccggcgcgtcatccgaaggacgatcttctctgggagtctgcagttaacttgcacaggacaggagacaaaaatgccaccaaaaataagaatacatgctattggtataagatagatcgtccttgcagatcaaaaagctagacagggatatattttctgactatgtcttaatgacgaagacaggatgagcgaccttggaagatgacgagttgaagttgtacaaacgtacttgtgttgtgagacggaggatgatgtcatatgatattgctctgtgcgcctgccaagacatcgttgtacgcactgaaagcttggggaagatcaaatgatgtattcatgctaagctacctacggataggaggtcgcctcaagtcaccttaccgaccgacccaaattgcttcgtctgcatcgctctaagttgtcccaccatagttatcgactgttcggatgtctttgacgattgctcgcttcacgtccttattcatgctaaacccaactgcgttgcagcttgggttcgtcaacgacatcagacaggtcgacagctacgacggtacaatccaaggtgacgcagctcgttggtggggatagattttatcccttgggaggccatcgctggtgggatcgtctgcaacggttcctcgacaggctacaggagtagacaaagcccgagtcagggcatatcaacatcttgttttcgatcgttcacggccgggctgtggtagagatgtaacgccaggccttgtaagcttggcctgtgtcagagtgatgtgtttccggtctgattcgatgatcgccttaaaagtcacttgcaccgctgtcaggaggagctaaagcctaagaacgatcgcggatctgcgcaatagccttataactctgcttatatattccagcttatcccatctgccacataaaccgcacctgttcaaaacagaacaattagccatagatcatgcaatggtattgcaaattaaaaataacaatttcagtaactcagagaccaatatgaaacaatgtagatagacacggattcaacacattctttgcagaaagggaagaggtcaatcatcatagagactgtatatgttgtggtttgcgaggggaggacctgaatagttacctggaccagtcggagtattccccccagtggggacgattggtggcggcgggaactaccctgtgtttgtattagccactcgtgcctggagatattgttcctgaagcggcggcgagtgaggttctgcgtaaaagcgaatgggtttttcttttcaagtgacaacgatcgctatttgtcattcacagacgtggtggggagaggaatgaatggcttcctccatattcgtcttgaaatgagtgataatgggccagaaatgatgcaaaaaaggtgtggtgaattcctattgcctcaaggtggtttggaggttagatccgaattcccctgagtggtattaaatatctgtctctgggcagggctagggcatcggccctatttcagaaatttacgagtaaggggagattatggagaatgtcgtcattgaaccgtgcgacgacggtgtacccacctataaatatgtaagggcccatatgataactaggtgagatgtatgtatacacaaatgttgagtcaatctggcaaaaaaagaccatgattgaaggcgtgatcctgtctgtagtcctcgattatgcctttctccagcggctaccttattttgcctaggatgtctattcaatatcaactaaaacatgatatgcgccgagatccgtctggttgacgagatactctgtgcagagacgcccaaatatcattgattgtagtggttctggccaataatcttgactaggagctcttatattgaaagcggctaaaataggaaagccccacccagcagggaaaatatggcggagtgacctaagtacgagccggattcatatttcgacatgggcattttcattaactaattagtttcagctgtgggagttcttacaaatatcgatattgacagggtgagatcatctgaaactcaaagcaggcatacatacatgcacttctatagacgtcaggggtggccaggtgtgaagtgcttattcacaagcacaggtatcgtgctcgactccgtgggcagcatgatgcagaaattatacgccgccatctctccgagggttctccacttcctagtacggagtcgagggaaatcccaggcccagaacccccgcactctgccaagacgcaacgtttgagataagatcaccatatgactgtcaaaaaaggaaatgcactacaaagatcgtccaaaataaagccgtccggagatagcaatggggcagatatgtaaatgcagtgaaatctgaatacggaagtataaggttgaccttgagaggcaatttcggaggtacagtactttgggcaaccaattgcgacttcagaaggacaacggacacactattttatcctccaacgcgcatcaacttactactttaggtctgtatgccgccgattgcaattctcaattggcttgtatagtatcatcaacacctgtcacatgatttatgatattaccatgacaccatgcaaaagtacctttctatatttagtggatacggaggataaaaaggtgcgtccgtggtcttttcaagtcgtaatcagtgatctgtttttcactctggtcacagtcccctagtattgaaggttgaagctgcttaaaatgaccacggacgccaaaatattggatttttctgtgagtctctctacaagcgtcatgacattgatcttccgacttatcattgctggaatagacattccataatgtgatcaataatcagttgaccacaacaacggaaacccggcatggcatcaaccctgccaacactcagcctaatccacccgtaccagtttcgacccaggatgaccttgacaaatccgtaaaggcagctcaagatgctttcaagggctgggccaagacctcttttgaagagcgacgtaaagccctgcatgcctgggccgatgccattgatgataatgccgccggattcgcacaaaccctcacaatggaacaaggaaaatcattgactcaatcattttcggaggtgaagatggcaggtgaatggattcgtggtctcatcgttattgagattagcgacaatgtcatcgaggaaacagaagacaggaagattgttcaacgccatacacccattggcgtggtgggtgccattgtcccctggaacttccctgtccttctggctgtcggcaaaataacttctgcggtatacaccggaaacaccgttattttgaagccgtctcctttcacaccttactgcgacttgaagctggccgagcttgccgccaacttcttccctcctggcgtgatccaatgcctgagcggcgatgagtccctcggcccgttgttcactgctcacccacgaattgagaaaataagcttcactggatcaactctcactggaaagcgggttatggctgcatgtgccacgactctcaagcgagttaccctggaactgggtggcaatgacccggcaattatctgcgacgatgttgatattgatgttattatccccaagattggacttctttcttatctgtgcagctcgcaggtctgcatgatgatcaagcgactttatgtccacgagaagatctacgacgagttcttggagaaattagtcacgtttgtcaagactctgaaagtcggcgagggcaccgatgcggataccttctttggacctgttcagaatcagatgcaatatgacaaagccagaaacctgttcagcagtatcgatactgaaaaactgaaagttgcgcttggaggttcgatcgagaagtcttccgggtactttatccatccaaccatcatcgacaatccgccggagacatcgcgcgtggtacaggaagagccatttgctcccatcctgcccatcctgaaatggtctgacgagaaagatgtccttgagcgtgcgaatgccttggataccggattgggctcttctgtctggagtaaggatttcgaacgcgcaactcgcatggcagatcaactccagtctggttgcgtgtgggtaaacagccactttgacgtggcgcccaatacaccccttggtggccacaagcagagtggcatgggcgtggaatggggtcttgatggtctgcttgagtattgcaattcgcagactcagtggttgaagaagagtttctagtttgtagtttgtgtctagttttgaataagacagttaaatgccaacaccaaaaaattcgaaagactttgcttcagagattgcaccgtactagttcgttcgcccactttcctgaatatcggagatctccccagagaaatgtgtcaattctgagattcatttgttatcttatcacgcccctcgcggatcttttcgtccatcggcagactccgtcttgtgtttcgtctcacgtgagggtatggaatttgacgataaaaatggctgaggggtcttctgggctaaatcccattgaattttgcaattcgactaggaacgcccatcagacgattcgccatgctgtacacccatgcaacgattgtgaccgtggatgcttcgcgccgaataatcaccgatggagcaatccgcgtagtcggcgatgtcatcgtggatattggcaagacagatatcctaaaagaaaagtatacagccgatgaagagtgcgatctctccggtcggattatcattccgggattgatttccacccatatgcacacggcacagacactcctgagaggtgcagccgacgacctcgagctggtgtcgtggttatgcgagaggatttgggttctccagggtaacttcacggcagaggacgggtacgctgcagcacgattgagtatcggagagatgcttaaatcgggaaccacctgcttcttggagagcatggtattgtaacccgtcaatgccatttaataccctgagattgacatgaatacagtttgccgatcgatatggctttgacgggctatgtcgcgccgtcgaggagagtggcatccgtggctgtctaggtaagattgtcatggacattgcaaaatatgccaaagatgacgcctgggctatgcatcctggccttgttgagaaccgtgaaacatcattgcttggaactttgaagatgtgggagaagtggaatggtgcggctgatgatagaatcagagtttggtttggagccaggactcccggagggtatgagacgagactgttattgagtatcactttctaatgataaaccagagtatcagacgcactttataaggaaatgaccgctatttccaaggacaagggtatacccattaccatgcattgcgctgaggtcaaggccgatcgggatttcttcgattcggtctcgcacaccccgatgtcatattgcaaatcagttggtttgctgagtgactccacggtcctggtgcatatggttcatttggatgactcggacattgagtaagatatggaacatatgaattgatataacggatgctgacgatatcatgaagactcctttcttcttcgggaacgcatgtcgcacactgcccaacatctaatgcaaaggtaagttgtattgccatctggtttatatacggttggaacttaacgatctaacaatgtctagcttgcgtccggaatctgcagggtgccagatctgcaagatgctggagtcaatattggtctgggtaccgatggtgccccgtgtaacaatacatgtgatcttttgcaggagatgaaattggccgctattattcataaagggatctcgcaggatcccacggaagttccagccgaaaacgtgttggagatggctacaattaacggcgccaaagcactgggcttggataaccagatcggcagtctggaaattggtaagaaggctgactttgtggccatcgatgttcgaggaatccacagccagccttggttcaacccggtcagcgcagttgtttatactgcaactgggcgagacgtcgatgttgttgtggtcaatgggaaggttgtggtcaagaatggagtgcttatgactatgaatgaggaggaaattgtcagagaagcacaaagaagaagcaaagaggtagtggatagagctggattgggcaagaaagttcagggccgctggccagtggagtgatcaaacgaagattcaactttcaggatttttgttttcattctattatctagcaagtcagttcatgcgaggaccatgcctctgtataggtctatgatctaggtcatagcacattccattgctattcaagtcattaggacatgccttgcttacaacagaccacgcaacgcttcgcccaaagccataatagccatagcctggccataaggcattgaggtcaatggaatcgtcttataaaagtaaagacattcacccatcccggtgccaaagctggtattctgcaattctcctttctcatccacgtatcccatcactgcgctgatagccttctcagccacggggcggtattgggcaccgatgtaacgtttccgaacggccttgaggataccgtaggcaaagccagcggtcgcagaggcttccaagtacgagtcgggatggtcaaggagggtgtgccacgcgccggatgacgactgaagacgctgaagggcctcacactgtgcctcgagtgtatctatcaggtgaagacgaatagggtcatttggttggaggtcgagtagctcgatgatctcgggaatgacaattgtgacccagctgttgccacgggcccagcgcgcatctgcaaaattgtgtccgccgtgctcaaaagaccagccgtgaaaccagagaccagtctttgtatcgaaaagatatttgatgtgagtgaggaattgctttttcgcctcttcgatatattggggtcggttcagaagctttccgatcttcgcgagtggcataacagtcatcatcaaagtatcatcccagagctgctggtagttctctgtgatataagtcatatgctgcatgccaccgtagcgggtgcgggggagatcgtgcatcgcccactcagcccacgcatcgagccacggcaggtaggtgacattgccggtcttctcatagacgtaggcgagagtcaaaaacacagccattgtgttgatattcttggtagtgccaccctcggcaaaacgtgcagcaaaccagtcttcgatgatgcgcaacaatctctcgtcgcccgtcaactcgtagtatttccacacgccgtacagtccaattccgtgtgtccactcccaaccctgccatgactttgtgtcaataatgcgcccatcaggaagtggcagtaggaattttcctgtctcgtctttgatattgaccaagttatcaatcaacaggttgacggcgttgtgaatttgggcgcccgtaggcttaggggacgacattgtgtgatgctgggagactgttctctgtattttcgacgaataagagtctccacactttttgtccgggaaacaaaatattatgtgccggaagctccaatcctcgcaaagattggcaagagttcttccactaataagctcttgggtcaaacgccacgaagcatccccgtgggggccaagcgtgattcgggcgaaagaaggccgagttgcaaactgacggaaaaacggtggtaaggcgaatgtatatgtggcagaaaaatctcaataaattctctaactctctaaaactgacaatagtcctaaaacatgacaatctgatggacaacttagtaatcaaaacaaacaaaacaannnnnnnnnnnnnnnnnnnnnnnnnnnnnnnnnnnnnnnnnnnnnnnnnnnnnnnnnnnnnnnnnnnnnnnnnnnnnnnnnnnnnnnnnnnnnnnnnnnnnnnnnnnnnnnnnnnnnnnnnnnnnnnnnnnnnnnnnnnnnnnnnnnnnnnnnnnntgtggcagaaaaatctcaataaattctctaactctctaaaactgacaatagtcctaaaaacatgacaatctgatggacatcttagtaatcaaacaaacaaaaccatctgagttggtttttttctgcagaaaaaccagcctggtcagtcacgtgacccaactgtatcagggatggaaaatgacagtattcatcctagattctgacacaaaccatgaaaataccttcaaagtgtatttatccagatccaccgcaatgagccacgtatgttcggctatcgggctaatagatccccggattccccagcgcggggagaagactagcgtgaagcctcctcgttcgccaagaaagccggggaagcaaaggagaaggggctgactgcttgacttggttgaacggaatctgacttccggttaatatcatagacctagctaccgaaagggccacatgactctttcagcctaatcatctcacatgtagttagagcgacttctagttgggatcatgcacggccctggcaacaaaagcgcggcacattataagtccgacctatctcccctggtgaaccgtctttttgcacatactgcgtttattttgtcatggccgacggcagagatgacccccagcaggggattgagagcgtacctgttgagggaaccgaggcagtgaataaacagcacccaaaaattgatatgggagagtacgagaacaaacaagacatctcgcacgttgaacaggttctctcggcatccgatgatcttgcaaaagataacatggatatcacccgtgtggacaaggaaatccaagcatatgccgcccacagtcaggtggaaatcgacgatgccacaaatacacgcctcaaacgcatgattgatcgccgcattcttgttgttatgatttgcacatatttcctacaggctttggacaagggaactatgtccttctcggctattatggggattaaggatgacgcacatctgaaggatgggcagaaggtatggaatacttgtgaagcttttctctccatcagcatgctaaattcactcctaccggtagtactcctggttgaccacgtgtatttacatcgctgtacttatcgtcgaatatcccaccaactggatcatccaaagagtcccactcggcaagtacctgggcatcaacatctgcctgtggggtatggttctggcactccattcagtctgcaagaacttcactggattggtcattgttcgcaccctcctgggtatctttgaggcttgctgtcagcccattttcgtcactctttcctcgatgtggtataagcgggaagaacaagcggccacggtaacatactggtatgtgaatactcgtctaccggacagtgcacattgagctaatggtaaaataggtacatgatgaacggtgcccagcagattgtcggcggactattggcatactgtttcacccttattggggcagacaaggtgctcaagtcttggcaagcactcttcctggcatatggatgtatctccgttatctggggactcttcgtcatttggtggatgcctgactcccctatgcgtgcgaagtgcttcaccgaggaagacaaacgtctcatggtagaacgtcttcgttccaatcagacaggtatccagaacagaaagtttcatgcataccagatgtgggaggctttctgcgatccccagatgtggtgctactgtgctgttcaaatattcaccaccctccctaccagcggtctaggtgcattcttcagtatcgttgttttgagcttcaactttaccgtattgcaaactcagctacttgctatggtgctaggtgcttatattattgttgttctgttgtcgtctgcatggctggtcaacagattcaaacagaatacgatcgtgatgttgtgcttcatcattccgtacgttttttccctttgttttgctgcgaggccagactgacggttcacaggtcttttatcggaactatcgtccttatgacggtcgaaaacactactttgcccactaaggtgggccttctgattagttactacattactctgtcattctggtcggcccaaactctcacgttatctatggtgtcgcgaaatattgctggtcaaacgaagaagtccaccgtggtagctgcaacatttgtgtcatgggccgctggaaacgcaattggtaagtatctcagcttccctgtggagcagtttagttcctagctaacagattaaaggccctcaagtgttccttgacagggatgcaccacggtaccacattgcatggagtgtccatctggcttgctacgcctgtatggtttccgctgtcatctacctacgcttccatctcaagcgcgagaacgccaagaaggataagctgttggctgaggcaggtctcagtgccgcagatccaaccctcattcatgcattcgaggataagacggaccgggagaatttgaacttccgctacgtttactagatacgcaatatatttgcgttcgtgtgcaaatttcttctaggcttacttgctcggcttagttttgttcaattatatcttcaaaaattgcattctagacacatttcccagcatcacacaaatagaatttcgaatgtctcgatttatagtatttccggcgtatttagcggagaattgtagggcggtggaaaaggcggtatgtagaagaagccaatcatttcatggtcccgatttggccgttgccccgtactacgagttccaaggtccaattaaagctatcaagccacctagtactccgtatgcacctccatctacaatccaaacccagagccccgcagtctataaacaatcatatcgcatgattagacagtctatttgaccttgaacacatttcgaacttccccacgtggaaaccccttagcttgaggttgtcgattggaacctcccggcggaaatgtgaagccgatggtaaatatgtcaacgcggcaactcgcaagactttcacggagttattacctcactctcggtacggagtagttttctccgtcttggcgctagatcaatgggttcagatattactatgttgctcgtggaggtatcggtatctcgcatccatcatttttcccttgtctttcacccagtcgccaattttcgacaatgagattgatcaagaatgaacatcacaaattcataatggagtaacagggcttgaataataataccctatattctttcgacggcgcatctcctaaactagtgccaagggcgactaccgacactccaaaccggccagtgtgtcaggttctcttccaaaacaaccacagcttcatgcgtctgacctgacccctggttgcattgcatgattacttcttcttgatggatatagatcctgagctatctcgacacggagtcagcgcgaccccgctggtggcgttgtgactccttgcgaaaataccccttggcttgtccttctccgtgcagaatgatcactttggtcctaaatttgcgtatagtgtatccgattggtctttattcctggtactaatgaaattctcaatccgagacagattagaggtattgaccaggagcacagcacatgaaaccaagttgtactcctttagatcactataaatatgaccgtcttctgctacctaattcccactcaacgcatctatttctttgagaatccggctttttcaatctgcttattccaataaatccgcaatgtatagccttctcggctccgctctgtttgtgtctctcgttgcgggccatgggcacgtcaccaacatcgttattaacggtgtctccttcgatggatgggacataaacagttatccttatacagactcgcctccagttgtggtggcttggggtaccccaaacactgccaatggtttcattgctccgggtatgttattctattattgtcctctttgaccaagaccaatttcctttctaactctgcaaatatagatgcctacacgacctctgatattatctgccatctcaacgctacgaatgctaaaggtcacgcggtagtagctgccggtgaccgagtctttattcagtggactgccgactggccggaatcgcatcatggaccgatcgttgattatcttgctagttgcggcacgagtggctgtgaaactgtggataaaaccacgctcgagttcttcaagatcgacgccgtcggactgattgatgacacaaccgttcccggtacttgggctgatgatcagctcatagcccagaactcgggatggatggtcgagattcctcccaacatcgcacctgggagttatgttttgagacacgaattgtacgtaaatcccactcatttctcgaaaaagttgcgctaactaaccttgctgtgaaggatcgcactccatagcgcaggcactgagggtggtgcccaaaattatccccaatgcttcaacctacaaatcactggctcggggtcagatcagccagcaggtatcttagctactgatctgtacaatccaacggatcctggaattctcgtgaacatttacacgtctctgtcaacctatgtgagtgattaattggcatgatggtttgctgagatttcgcactcgcactcccctgctaatatcattttattcagactatcccaggaccaactctttacagtggtgccgtctcaatcacacaaaccacctctgcaatcaccgcctcaggtacacctgtgacagggacgggtgttacgaccggcggaaccactacaacctcaacctcaacctccaaggccaccaccacaacgctagtgactaccacgacgagcactacgagtgctaccacgacgagcactacgagtgctaccacgacgagcactacgagtgctaccacgacgagcactacgagtgctaccacgacgaacactacgagcgctatcacgacgagcactaccagtgctaccactagtacttcttctgctggcggggacggagcgtcccagactctctatggtcagtgtggaggaaccggttggacaggagcaaccgcatgtgcatcgtctgcagcctgttcttcgatgaacccgtggtattatcagtgtcttccgactgctgcttgaattgatatggcacaatgctcaaataaaacctgtcgcggaatggtgtattcaaagtatgagcagaaaatgattgcaactgataaagcctatatagttgacgcactatcggctagggggaagtactctagtagttagaggaagatttatctaattactttggacacttgtaaccttgtcatagtattctattcgcattcactacctaatggtttatgccaagtaggcgacagtaagcagttcataacaactctatcttgaacacgagctagctcaaaacgttgcctttgctaggttggaggcaaagtttccgtcgtcgaagggaacgttcgctgctccaaaatcagttgtatccagggcatcttgcacgacagcttaagaatatgttagattgcgcttccagaagttgggggtatatttggataacttacttgacaatgattcccaggcaaccaacggctgtgtgccgcccacagtggttgtcaggccgagagaatgattaacaggccagatggactggtacttgatcagagaggcggtcccatcaagcgtgtagccatctgtactgcagttccagtcaccgtgtgctgatggacagacggccacaatgttcgatgcagtggtacttccatcactggaaagccagataataacaccttcccaatcatggcgatggccgagatcagtcgaaggcgaatccttggggaaataccaggaatacatcagggcatagtagttgcctgaagaagcgcctctcactgtaaattgcaaatagaagcccgttagtcaatgtacccagggccaggtattcaatagatacttctggagaaactcaccgtatatctgccctgtgctcgtactgcaatcaccatttgagcttcctgttgggctgagaccggcgctacatcacagatattagatatgggagtccaggagatcgttaaagaggagattaattatttcgctcacttggtgttcccttctgcatcaacggccgggaaaggcacgcagccattgacaacataaagctttggctggtaggccaaatagaggtcgccaacggtaccagctggaactgtctgggggaatccgacaattgcgtcggatgcaactgttcctcgacgtgtcagctcaaccgggctagccgtcacaggcagaacagtgagagcagccagtccagctatcagttgaggaatcattttgaaattgaaagcaggcatgctaagctcgtgctatgagtaaactggtttccttctaaatatttatattgtacatgtgatattcatccctttcgatcggcatccgggccactttcttcaggcagtttagtccggtggaaacggtcttcagtcccaatgcagcttagtgagtgataatagagtctgtcctaaattatattgttgttcgcccgtgggatcgacaggcccggtgattcgtttcgttacgtctctccaacccaaaaaatccacaccccacaagctgacgcaatttatctgcttgccaaacgggtatctatgcttaattgaagctagtttagattttagtatatagtagcggtctttatgcaccttggcagagatctaatattctcttgaacaatacaccatggctgaatataacacgtggtgatgatcgacatgatcggcacgttcttggcaccactgtttttttacaccaatcacggtagacaagtcaggaaattccccagcttcttcaaaacaatcccctgcatctcagcgtcggcatcgttcttcgaagctgctatccccactgagacacttgcatagcacccagacgctagggatacttcaacttcgcttggcaatctcgatttgccacatgtggtcacatcattcggagtaagaaatgggactgcgatatggatgcgggacagaacgaaagagaaatcggccgggcttgtgcattcgtcggaaacctttccgaaattgacgttcagccagacatcatccggcaggtatggtttaccagcagcaaccacctggttagttaagttggttgccaaatcggcgtagacatcactgtagtgaggccgcgagctttcccacgaagtctgagagccactagcaccggagaaagctatagctgggattccctcatgcgcagcgtaggtggcagcgcccactgttccggagaagtaaactgtgaggccaatgttattgccgacatttggacctgtgacagccaagtcaggggggccgttgaagaatttaggggcacgcgtattgatgccatattggattgatgtcaccgggtagctattgacataacccagtcggggctattcaagtatacgatcagtctaccgttctggtaacagcggtgacgatactgacctctgaggaattgaatcccacggccgggctgccagatgggcagctattgaactcgcatggctcagtcaagacagttggctctgcttccattgaccctgtagtggcgcgtcaataaaagggcggaatgtacggagtagagaggtaggcataacatacccttgccactctgattctcagcgggtgcagataccacaactgaatggtctgctgctcctagggactcgaatagagcgcggatgttcacttccgcccagccgtcatcattggatgagatgatgttgaccgcgctagcagccagagggagtatcgcaagaatatcgaaccgcatattcaagacatccaggggcgttgatacagtgtagaatccagggggttgtttggctgctacttgtcctcctcaacacgtgggttgtcgatcttactggaaacctcggaggaacctcgggatccgccaactgccgtagtcaacggctcaatccgcaaacagacgaacagaaattgaaatggtagatcatgtactctgtgacgtttgaattcagcatcgaacatttaaataagtttaattatggtggtgggacgatgtagacgaaaatcacatccatgaatctcgaaatatatactgcgcaacctcagctccgtaggccaactgaccatcgactatcttacaacacagcaagtggaaagcaaattggttacacaagaaacttatcgtgtaaatgtacctctagaagttgaaatttatctatggatgatgccgacactaacttaaaaacgccctatggtcggcttggtcgccatctctcattcagaacgagcactcttagtcttcttgctcctcagcttcatcatcaaaaataccaaggcgtaagatgagatgcaaaatagggcagtgagacccgtctagaagaacgattagcatcgcaatataggctagataaagcagggtatactcacatctctccacgaatagtatttctcttgaagattgaacgacttcgcataatcggaaccttccgaatacggacagaaggaacacatcccagtcgaggtctcatcgtctaggtagccagtctgtgaggcgaggaagttggccatgtattggccgcaggtctgaccagacggtgcggtgaactgcacaaattccgatgcttcgcacttgaccttgacatcccagatcacttcgccaaatagcccaccaaccaagtagtggaaagggtccaggtagtaaatccagtaacgccaaaatggctgcataagggagtaaggaaccaccacgccacagaaactcaccaggccggcaccaatcaggacggggttcatcactgccgcgaaatactcgttcggtgcataggccgcaattgcctgaccaatggatgtgtataggagctcatagactgtcttgatgttagatacttggacaaatgctcgttgaatacttggtgtatcttacaaatcatctgaagatagacatgtccggaaacactggcctccaccggaagccccgctgtgaagtaccagcatgcaaaatatagtgtggcgcaaatgataaggtatggaatctccgtcagggtctgtgctccaatgaaggcgctccaatgataggttttcgactatatggacaccggggttagcgatacttgcacggcagtaggattccactagcgcactcacctttttctctcgggtctcaaaaatgtcacgactatgcaagaagaacggctgcatttggttgatacagcctggggcgacgaagatgaagttgaaaatggcaaacagtctcaactgcagggagaaagtgccgtttccaatcttccagaaggtgaatccactgaaaagtgctgcgaaaatatggagaaagaccttgttccacatgtaatcctatatgaaggtcagcatgtgtgacctggtttgtatgacattgcagcaacgtactggtgaacgccagatatgtatgctgaggcgcttagaaaccgtcttgaattggaaccagtgtgaggtcgcaaaatctgcagtatcttcaacatattcggaatcatctctgctgctttcgttgagagcatcaagttttgagagtgcttgtttgcgctcttctgactggttccagatttcgatccaatcttgtttttctgcagtaccaccaccttgaacgacatcaataatgtgctctgctggattggcatcgggggggcatggcgctccgttccgggcgaagtagtccaaaatcttggttgactccttgccagctataaccacaaacgagtcattagttgcttgatcatgaccaatcaccccaaaagttaaaactcactttctccgaaatatgtcatctttccgcccttagctagtaggagaagaccgtcaaatgcgtcgaataatactgcagatggttgatgaattgtacactaacacattagtaagatgaaaatatgtttcaagttattcagaacttaccaacacggcttggccgccatcgaccagttttcgaaggaaacgcacaatgttgaacgcactttgcccatcaagaccggaagtgggttcatccaaaaacagcagtgtgggcttagcaacaagctcaacgcccagggtcacgcgtttgcgctgttcgatgctaagtccagctccgggtactgtgaataatcagtatagctgtgcagtgaaatcaagacaccaggcgaacatacctccgattagggcttcgctgatatcacgcagctccagaaggtcgataatatgttcgacgtaagcgatcttttcttcgtgtggaaccgtcgatggctgacgaagaacggccgaaaagtccaatgcctccttgacggttgctgtttcgagatgtacatccatctgttcacagtaaccagtagttcgctggaagctgattccgactgggcggccgtcaatcaagactgatccgtagatttctccgctatccttgcgctgagcaaggacatccaacaaagttgtttttccggctccagaagctcccataagggcaaccaggtttccaggttggacaaatccaaacaccttgctcagaagctgtttcttctcaccatggaaaggtacatgatagtcaagatctttccatgtgaaggttgactgcttgaccgagcctaaaagtgcgccagcatctgcctcctttggcttctcaccttcttcctttccacgagtcttctcactgccacgcttgtaaagtagaacagatgatccactttggctgttccggagttcaagcccgcaagaagtcagaaagatgaaaaaaaaccaaaaaccaatcaaaataccaaagcttctccagatgtgatgcactgaataactgtattgctcttgaatgtattttgccccatcaataataccttcatcgtcacttccaaggactgaacatccacggtggacagacactgagctggagtatccggtgccgtatggaagatagtcgggctctatgcaagtgaatttgcgtccaacaaattcattggccatgagcgcttcgaatgcatacgctcccggattgaggtagaagatccaacggaaccacacatgcattttatggaaaggaataaggtatcctgcaacttgtcagtttggaatgcttcgtatcaatgctgttcaaatactgacctccatagacaaagaagacggtggacagtaagccggatactttagatgcatttccaaactgtttgcacacagcgccaacggctcggaataattgtacaaaacacaatgtctgtgcaatgacaatgatccaaaatgtgaagaactttcctgcgttcatttgaagagcagccatgaagtaaaggatgagcgagaagcaggtcacctggaacaccacgactgggatatcagtgatggcgttggcaatagcgaaggccgtaggtcggtaaaatccgaatcgcttctgacgagaaagaattggccggcccatgaaagaagcagtcgtttcagacagactttcaaggagaaaatacaacaccggaaagaagcaaacaccgggtcgtaagaatattgagctcgaatccttgtagtttcaactgtcagccaggtgttcttgggtcgtgtcgggtggagagcttctggattacttacttctgccaagttatagaataaacttccacagactagagcctgtattatagctgacccgactttcacaaatagcgacagtttatcgccccagataacctgaaactgacgaagagcacaagcggcaatttgatcacagagattggctgtgtaaacactgttgttccgaggaatatgctgtttgcgcttttcactagatactgccgtctcaagatcttcggcttcgtagctcagcttctgagggtccacgatagaatttatttgatctttgcagattgagctgttttgatagcagatttcgaagtcttccggtgtattgggcaccttctcttcccacccgggtctaactgtacgttccgtaacgacagtgactgatgtcaggaagtccgcgacatttgcgcccttggggcagatgaatccaaggtcttcaaaatacttccttgcgatacggcgagggccgtagtaagtgacacgaccttcagctaggacaaggaccttgtcgaactggtcataaataccgtttccggcttggtaagtagtcgtaatgattgtcttgtcgtttcgatccgcttcgcgtctgagcattcgagcaaattccacagctgatttcgaatctaatccccgagtgggattgtcccacatctggactggactttgcccagccaggacctcagcaagagaaacgcgcttacgttcacctcctgacacgcctcggatatactcgtttcctactaggttcttcttggtgtgtccgattcctagtgagtccagaatctcatcacgatgattctgcacaaagtccttgcggttccttaggtgctctgggcgctcattgggaaccttgtttcgaagggcgaatttcattgtacggttgacagttagggttgggaagtgaacgtcgtctgtggtgcagttagcattgagctcgatatatctcaagtgaagattgcatgccttcgttgttgaacatgatctgctgacggaaccttttggcagcttcgtgatccatgctcccgtagttgacttcgccggtcacttcatcaaaactatcccgatcattggagaggactctgagtagggaagtgcatccagagcctgggcgcccaagcacgagaagctatattgattagttacaacgttcctattctcgagttgtgggagcataccatttccccaggcttgacctgaccgacaacatctttgaggatcgtctagaaatcaagtcagtataggataactggaatcatagtaaagtatgcccaccctctttgggcgggcgccacgcttgaacagtgccccaatctgtcgcgggtccacctctgaccataaagtgcttcctaaagcagcctcaggtgccgtaactcgaacgttaagatcgcggaacgtgactgtaagccgtttgcgaatctggtcatcgccgtgttccagatcaacaggggttgttgtgccggacgatggagtttccatgacggaggtctgtattcctgaaatagaaacgaacgactacttgggatcgcaccaattaaagtgggattggagggaaataccatgatgtcgaggcgcagcagacagcagaactcttatattgcgcatcttattatggcatctatgcttttaaatccatattgccgagagtgggtcttgctaacagatcacatcaagcatgtatcgctgtagcggaatttatagataggggaaatgccttgaaacagctaaaaaactgcaagtactattgtgttagcgaggatatcactggggcgcggtgctcggaaatatacgaacggatatatgagcgacccacttggtcagcaacgatcgttgattcgctgattttctatctctgcgcctttcagagcttccagagcttcaattagatccacccttcggatatagatccacttgcaccggtcaccgatttctaattccgtggatgatccccctgattgagaccaaatatatacagtttgaagaagtcgtattctaggttatgaaatttcctggtgtgaggcccatcagaggactggggcagaatttgactgataaaccgaaaaaaaagcatccaggtccatggtggagaaatcgaaatcccagcccatgtcagactgagtaaaatcaagcaagtcttccccggagcccgcagagcctccggtcgccggattttccagggtttccacctgtgggaggttccaaggagagtttgatatgccaggccgcattcctattgacaggttctgaggaattggggggtttttgggtagtaatcgatgcctgccgtcagaagtgagcccttgctgtatggctgtccctcctgggggcgcaatgttatccccagttgttgctaatagaggtacccattcgtacgatgggttgatattgcgaagcacagtctgcatggctgcaattgtgcttgcgatcgggtccccagctcgcatagttgacaaaatttgcattgaagcataaacccatggcaggtagacaggcgcgacattcgggttgtgaatgaactcatagatgagagtgaataccgaattaccgaagaagtacccatggtatcgtaattcctacgataatgttagtggaacttttataacaacattttgtctatttaccagaacaagattattgactcttgaagcttcacataagtgatggagtgttttttgggcagaagtgatggcatggttgcaggcttcgttgagccaagaaggtgtttctctggggtaatttgtgacatgggtgctagactggttgagtgcgatattcctctcgcgctgccaatggccgcgaaatatcaagaacgggcgaaatgtaagaagtagtgtatgatagtatactagctatggtcagagtaaggtcaaaaaagtgccgactattcacttacaggtaatgaaaattgtttgtcgaaccccaagggatcccgcctggatgctactatcaagaccaagacccaaagcttgttgtagatgtgcttcatgaccacggatgtcgtccgcaatagaccgagcaactctccacatgtgcagaagagactcatgccgctggccgtatatctcagtaacagaacgagtgatggtcttgcaaagctgcaccaacaatcgaataaacggatcctgtggatactctattgcgacatctttaagagatatagagctaggacgtcccacatgaaagcagaaccagctatgtatgaagttagcgagttcatcaagtatcgaactgaaaagggtaatttacgtttcgtagatgtaaagagaccagaaagttacccgtcgttcttcaatattttccggggtttgatcaacatcatggggaacatccttatgcaaacctgctgctaaggccttgcgagaagcagaacccaaatgtaggaaggctgagttgggccgaccttgttcattctggtaattggcgtaaaatccatgtcagtctgtaaacaacaagaaagggtgataagaacttatcatatgcaatgagatttggatagtctgaaggttcaccacatcatcaaacgcggttaatgaagccttgacacgctcaaacagcacatcaccccaggcaaaatgatccgtgccaagtgccgcgcttgccatggcaaggagaaggatcgcttgggcgaaagcatctagatggtctgtgggcgaagagttgtagagtttgtccagacattgctcataatatatctttgggcgaagtggcatcagatgataaaggctggagagaaatcgcgacagaaaaagcttagccaagtcgtacggcagaaacatcatagacaaatctcctttcccgagggacttgttctcatgaaagtctggtgtcccgaagaaaatgcgacgaaagctgaacaaatccaacccagctccagcctcctcgactccgccagagggttcaggctgggaggcaggattggagacgagatcccggtagatatgctgcatgagagagaaatgagatgtggggccatagtatagctgcatccgacatgacggtgatgccatatgtgtcgcagaaacgctatttgggaagtcattcatgacggaggctgtgcgctgcggcactccagttggagaagcttgacgaggtgaattcctctcggtggcttcctcattctcatgtttctttcgcctgtggcgaatatagtctctgtatatacagggtgtgttgcgcagttggcaagttttacatctgatgttatattagccatgtattcactatccgagcatagaccaaaaaatctcacggggtcaggccattgcacttgattttacgtttgcggcattcttggcatgcgcgagggattcgccaacctgcctgagctttatccgatgcctcagacatgaataaatttgtatgcaatctcacacctcctatctgtgcagttcatccgtttaatccgagggattatccgtatatatccgggtcacgtggtgttatgtcatcaagtcagaccacggcggtgtatctattccacgtctgcgtacgttggagatcaaaactagttctctccctgataagttatgtcgaactccagaagtatctccaagtttatgatatctgaatttgcgctcttatatcacatgacctagcaccttgtaacagacgcatctaaatccctactcgaggtcgtcctaagacgtcgcgcatgaatcactatctagtacggagtactccgtacactcttgaaaatagcctcaactcatccgatgcgagcagctttgggacagcttcgggacaagttccgatcggatgacatctttccgatgcatgtttcttgcaagactcggggttatggacgatcacaacgcctgaccaattctggggttatggttggtcaccacgacgactaagagatagtcagatgaggggatcgggatttcccgtacgaagtgcctaggctgtacctagactagggcttataatccattcggataaccccacaaagccaatgatacaatccggggtggatccacaagtctggggaaatctcgaagtcatctggggaaattccaagcgtggcttaccattgatttaatttcgctcgaaactttagatctcggagactttggcgtgctaacaatttttatgattgggtcttccactgccagttctgactagcaaggcatccctctcccactgggagcggcagattgggatttcagctgctgaaaaagccgaatatcagttcggaattgaatccgtgataccccacaacactagactcatcatctagatcttcggacctatataatacccggtcgccccctatgtcttccgtgatccctgtcatctgaaaacttcagaccgcccttttaccccttccaacctcaatccactgtcaggtactccaacatggctgacgccgagagaggcaccacgcctattggtgacgaaaaggtcattttagaccataaagagtatatgatgggtgaagtcacccatggtgcagcagaaaagggccaactcgcgactgacgaacatggccagcccctgctaaaatttgacaaggccgccgagtcacgattgcgactcaagattgatttatatattgtcccaactgttgcaatcctgtatctcttttgttttatcgatcgagccaatgttggtatgtaaccaaccccggttattattattatatcccgagttctatgtccagttcaaacactaatccgtttcttttctggaataggcaacgctaaattggccggtttcgataaggaccttggactcaagggctatgattacaatgctgtgctctcgatattctttatctcatacattatctttgagattcccagcaatctcatgtgcaaatggatcgggccggggtggtggctaccagggatcacattggggttcggtatctgttcggtcgccacggcttttgtcactgatatgcgcagcgcatctggtgtccgcttccttttggggtatgtgtcctagagttcgcaaaatcgacaatgctaacaacctctcccttagcatgttcgaggcaggactcatgcctggaatcgcatactacctttcacgttggtatcgacgaagtgaacttgccttccggctatcattatacatcgtcatggctcctctcgctggagcgttcggtggtcttttagcctcgggtattctcatgctagatcattttggttccctccgcagctggcgtatgatctttgcgattgagggtatcgtcaccattggaattgctctcatctcattcttcacgttgaccgaccgacctgagacagccaaatggctctcccaggaagagaaggacctagccattgctcgtgtgaaatccgaacgtgttggcgcgaccgaggtcctcgacaaattcgatgtagccaagacactgcgtggtatcttcagcccagtaacaattgtgattggggtaatgtttatgttggacaacattaccgttcaggggcttgggttctttgcgcctactattgtcaaaaccatttaccccgatgccactgtggtggctcaacagctgcatactgtgcctccttatgttgtcggcgcgtttttcactgtgctgttcccctacctcagctggcgatttgatcatcgcctaatctttttcattatctgcccgccgctaatgatgaccggtaagtctcagctccttgagcaaccttggttgcaaagcacaaggattgcagggtatactataccaggttccaggctaatcattacggggattgttataggttatatcatgttcctggctagcgaagccagcatggtccgatatggggccacctttattattgcgtgtggagcattttcctttgggtccctatgtcctgcaatcgcatcggcaaatgtgatttcggacactgcgagatcttcggctattggaaccacggtgatgttcggcaatatcggtgggctgatcagcacttggtcgttcttgccttttgacgggccgaactaccctattggtaatggtctcaacttcgcaacttcaaccgtcattctgcttcttggggccagtctatgggcatatatcatatgggaaaaccggcgccgtgcgcgtgtcgatgtccacagcgccttggcgggactttccccccaacagattcaggacctggactggcgcaatcctggtttccgcctgcgaccatagccaggttctatacctcgggtaatcgattttgccccggttcatgaccttagaactcctcactagccttcgtctcgaacatacaatgaattattggcaaagacataggctatctgaggactccattggcgttatacgcgtaaaattctctagatccagaattcttcggttcatttgagcagccgaagaatgaaccaaatgttctagagctgtacgggtcttacttcaaagatccgtggttggcagacttgaataacgaatcacaacaaacatatttggccaggaaattgcacatggctcaaaggattgccgatcatgtcggtacggtcttgttcattacaaaacacgcgaagaataactagaggctttggtgatcggcgtgtccaagcgcaccccacgccaaggaattcgtctttctttcttgttgtggtggtctgtgaaccaatcagtggcttcaaatcattcatggatggggttttctctagttttcgccccgcgataaataagccacgtacggcacagacattttcatccggacgttgtccgaaactcactgtcaaggttcgatggaggaaagaatagacttggcagatcatgtactccagtacgtcctgcgtcggagtagaatgtcaagagtatctgggaatgaacatacaagacaggaaacaagcgagccaccgtgaccctacagtgctcgagggaagccgcacatttcaatccaagggaacatgtggtgattcaggaactcggccatgttccgttgagatatccctggaacgagaaagacggcaacttcggacttgggactgaagacgcaagctctcttggcgctgttccccgggtcttggcttgtcccggtgtatcatgtgtatcatgtctcaccagtttacggctcatttggactacggagtacagggatctttcggtcttgacatatttctcgggctgggatttccggtccccagatttccccgcatgtcgtgggaccaacatctcatagctataaagaccccttgctctggctcacgtttgctttttttcctcttctcctactacccccggattatccccgtattcaactacatacttgagtgttgcccatcatggctggcggagcaaagaaaccagtcaatatattccgcctcaaagacctgggtgagcccaaggaggttttcaactggcgattatggttctcggtcatctcatttggcctgatgggcgctgcccgaggtgtcgatgaggggttgatctcaggtgccttcaattctaaagactttcaacgttacatcaactatgactcgtacagccaagtggaacagaccaacatcaagggaaatgtcactgcaatggtccagattggatctgttggaggcgctcttttgtgggttcttccttgatctttattatatcggatctcgtgtcactaacccggtctatttttatacagtgcgttcttggtctgtgatcgcatcggtcgtatctgggcaacccgccaactttgtgttttatggattgtgggaatcgcggttttcatgggtaacggtggcagcttaggtgctgtctatgctggtcgctttattgctggactcggtgtgggccagacagttgtcgttgctcctgtatatcttgctgaaattgtgagttgctcattaccccagtaatacatccatatcaactaacgaagaaaggcccccgcttctatccgtggtctttgtacctgtgtcttcacaggctttgtctatctgggtattgtccttgcatatttcgccaactatggttgccaaatcaacctcggcgacaacacgcacaaccgatgggtatgtgtgatccactccgtaccatatattatcaatactgactagaacagctcgttcccacgagtctgcatattatctttgccggcttgatattcctcctctccttcctccagcacgaatcaccccgatatctagtcaaacgcggccagctcgaaaaggccatctccaatctctcgaaaatccgtggcctaccatccgacgatgaatacgtcgtacgcgagatatccagtattcaaacgacacatgcagctgagatggaggccacaatgggttctggcgctatgggcgtgatcaaggaaacattccttgtcccatcgaacctctaccgagtctacctcacattcatggcccaacttctttcgcagtggtccggagccggcagtatcactgtctacgcccctgatttgttcaagttgctaggagtcacaggcaataacgagtctctcctggtcactgctgtgttcggaatcatcaaactggttgccgcaattctctgtgctcttttcttggttgatgttattggacgcaagcgagccctcctccttggtatcaccctgcaagcaattgccatgatctacattgccggcttcttgacctccgttcccgaaatgggagtcgacgagagctacaaggtaccggctgacaagaagagcgctagcgagggcgccattgcaatgatttatctctctggctttggatgggctctcggctggaattcaatgcagtatcttctgactgcagagctcttcccactgcgcatccgtgctctttgcacttctatggccatgactctccactttgccaaccaatatggtaatgcgcgcgcagttcccaatatgcttctgcccgtcgcagagggtggaattgaccccaagggtacgttctggtgctttgctgccattaccgttatcggtggtgtctgggtctggtttagtattccggagacggcaggtcgctcattggagagtatggatcgtctctttgctttgccgtggtacaagattggccggtatggtaatcgggatgccgatgaacgtgacctggtagtggatgagaagatggagatggcggtgcagacgcatggaacggctcaacatgttgagaggcaggatagagagaaccgagtctgaatatcatctagatatctctagtattcatttgctggtcatgattaatgaaactaacatcatgaataaatcccttttgaaatataacaaccaactcttgccccattagcccgctgaaatacgtgaatagtgcttctgttcccgccttatttcgaccattccttcaaccccgattgtcagaattccccgttgacgtcggcccgtctagcggaatgatcacaattctcgccttgagcgcagccttatcccgagacttcctggtagaccgtgctgatccctcacttgtgcgaatatccatatattccatatcattcaaatattcatccggtaaatcgacccggatcagaacacccctaggtccaaagaccgtctcgttccactgcgaaatatgacgagcaagatgctcaccacgagctccagccattgccgagatcagattccgttgttctcgtcgattcctggtgaggcgggcaatgaatatcgcggggatagcgcccagaatgccgaccatcaacccgcccactgccattgtgcccaggcctctgccaatcacagtggtccactgccgacgtgaaagcttagcttcgtcgcagactacttgtgtgaactgcgcccaatggtctttggagatgccgtaatgagagagttcgtctggatactcgaatcctgatgtgcaggcagcggatctggatggtatttgcaggcctcgtctcagagcagatgcaacagcaaacccgggctcacttttctcgggcaggaagattatgggattgtcggtcttttcatcgagggtggaattgaattcctcggacggggaatacatcggtggggcatcgtaatgtccagacgtgttcatagttggtgaaggactgtatagatacagctagtatttcttttaatgaagttttcttcttccacggggaaggattgatttgatattgaatgattttccgatttttgaacattaaaaaagggtcaccatcgcaaatatttatatttctgcttagccaacattcccaagcctcatttttctaagcaagcttttccccctcaggtatgagtccgtatgacttggccagacaccgcggcggtgttgggaggcttgtttcggcactcggagccatcaaaaatagctttcaaattggtgatgccttgtataggccgcaatattttgcgttcgagtcacttttgggagaccaatagtgattgcacgcgttacgagcaagggtccagatgcggtcatttagtacgaagataaggccgaactagattctcagtaattaagagtgaggctaaatcgaccaatagagtaatagtcaaccccgagatatctcatttccttcgtatgtctatactccgagctccgcgtgagtcacaatttctcacaaaagggacgtgcaccaaagcaaacaaccccctgagccatcaaggcaccacctttctccccaaaacttcctcaaatcacatcatgacaacgcgttatagggttgagtgtacgtcatcgcgtcttttttatctcgctgccctccactaacgtctcttagatgctctcaaggtacggctatctccgcaagaatatgtgtgcccctcactgacccatagccatgtagacccatcgccgggatcaactagtaagtcggtactacatatctaaagattaaagagtctgcctaacaatctgcagatcgaatggatcaaagtatgtcgctcggtcatgtcgtattcgccgattctaatccctctagggtctgctggccgtcccctttgtcctgcattcccagcccacggcaatctacaaggacaacggtgaggtgctgaagacagtcgccgccgacacccaagttcgctatgcagagattatgcgagatgtagagaatttgatgcttgatcatagtaagtggggattagaaaccaaagaactcggggatgatccctaatcggtacttaaagtccaacaccatgaacgcaatgcccccggaaaatcgaaattgaaccttctggtgccgtcagtgggcacttttttcaccaagctatatctggaagatgccttcaagtatcaagatcagcagcgattcatcagccgacgacgcttcgtggccccttcattcaacgatatccgacttattttgaactccgcccaggtgctgggtcttgttcgctccagcgaggtgcaactagtcacattcgatggagatgtaacgctctacgatgacggcgcctgtctcacatccgacaacccagtcatcccacggattttgcgactccttgaacaagaccgcaaggtcggcattgtgaccgcggccggctacaccgacgcaccaaagtattacgagcgccttcagggtctgcttgatgcgatgcacgaatcaactactctcaccgcagatcagaaacaaggactgattgtcatgggcggcgagagcaatttcttattccgcttcgacccgacatcaaatgcccgactaacctatgtgccgcggaatgaatggttgctggatgaaatgcagtcctggagtggtgatgatattaccgagctccttgatattgccgagtctgctctgcgagcctgtgctgacaatctcaatctgccggctgctattctacgcaaggatcgtgcggttggtgtttaccctgtgaacggtgtccgaatcagtcgcgagcagttggaggagactgtattggtggtgcagaacacgattcaacgttcggctgttggggcaagattgccattctgtgctttcaacggtggcaacgatgtcttcgtggatattggcgacaaatcgtggggtgtgcgcgtatgtcagcgctatttcggtggcatcgatccagctaaaacactgcatgttggtgatcagttcttatcagctggggctaatgatttcaaggtgggaagactatagaactctccttggctactggtcagactaacatttcttctgattaggcccgtcttgcatctacaactgcctggattgcaagccccgccgaaacagtggagctactcgatgagttggagaagacagtgtactcgtagtcattgaactccacgttgaacggtggaataatgcatctttctggagttcattatgtgcaagttcagtgtcaagtgttacgattgatacaccgggctatctttggactacctcttttatcctcacgatagcagtcgcccatagcgtttttaattcatttgaggtaatttcaagattcagattgatggttctatctacaacgcactttatgtcgcagatcaacagtcttcaaggggggtagaaaaccatcaaacaaaaaggcacgatcatccgaactcccaggcataaatgtcactcacgtaaaccaaccttgggtctcgaggacttattgcatagcaccatacaacgcgtaacggacgttcagtgcgatcgccctccacatcacaagttagtggatggctcgccggccagtacttgggggaacattcaagcatatcccgggtgtatcattggcgtggattccattgttggttggaaataagtggtcctgtgggtggaaatcctttcagggggagctgggaaccgaggggacagatcggactgtcgaaggatctgaagagtaggaaacacgacaatcgttaacattcgtatgagggggacaccagaaatgatcattgtacgggggagcaaagcgagcagcgacgaaacgatttgaacagggatgaaaaagcaaataagcagggtcgcagtcggtttacgtactctcgtagcaggaccaggtctcgtttttggtagcatgggtgcgtccagacagaacattgacaacgtcctgtagttcaagccagaactcggacttagggcgacggcggacccaatcagtctcggtagcctccagtccagattcaccacccatgggggagaatagcacctgtgaacctttgacaccaatgacagcactagagagagggtctgcggcaatttcatcaccgctcttattggcatatccttcgatgtgctgcatgcacctgatggccatacgcaaagcacgggcacgatccattggcgaaggcataccaccttgttggaagtgaccgggaacagcggcacgagactcgaatcggccccttgcctcttccttgataatgtcggcgatcacctgcgtagtgtatgtgctggatgcacattcgttacgcagaataatcttgcctgcacggttagcgcctttgtcgcggatgaagttttcacgcaggaagtctatgtcacgcgagagcatcttgatatcaacaccctcctcaggaatgtacactgccacggcaccaacagcgaggccagctgtggttgcaatatatccagatttgccaccttgggtctcaatcacaaacactcggcggcgagaagaggaggcggattgacgaatcgcatcacagaagacggtcagggtattcagacaggtatcactacccaatgagtattcagtcccggggacgttgttagaaattgtagctgggagcacgatgagcggaatcttaaacgcatcatactttgcacgagcctggcgcagttcgctgacggcagtgaaagcctcgaaaccaccaacaacaaacaaggcatcaaacttgtacagctcaaagcactgggcagtgccctccatgtcaacagacggcagggtacggttagttccaatgtccgaaccaccctcgttaacccagctatcagcttccagccaagtgacctcgcggactgagctgactggcttatcgtcgtggtgacggcataatccggggaaaccgttatgaatggccagtggggtgtggccatgagtcaggcagtatgcaacggcggcacgggttgcttggttcataccaccagccggggcaccaacgtgaatgatagcgattcgcattctctatgatatagtaagtatctagaaagcctgaggagcccggatgcgctatggaattaggtgtataccttgccttccggaagaatcatcttctggtcctggcctgcggtgtccaaataggcgttgtagtactccttgaattccggatcacgcagcttcatggcctcatcgaattcctttttgtcaatcaaggccgtcacatctttcgttgcttgaactgcttccatcagaggagtccgcatgatcttgttctcgcggatggtgatgactggtgaaggggaatcaggtgacatttcaagcacggcacgaacggcctccacaccctgtagagttgacagccagcggtcataagcgcacgctgcaccacctcgctgggtgtggcctagaattgttactcgggtatccaatcccagccgatctgtgagaatatccttgattttcgagctcgaaaccttgttcaattgccgatcctgtgctccttcggcgacgataacgattgtacgacgcttgccgcgttcacttcggttctgtcaagccccttgaatcagcaaaaataaaacattgaacaacactgaagtaattccaaccttcgtgattacggcacacatgtcatcctcccagccctcctttggaggcatctcagggaggaacatccagtctgcaccggtactgatagcggacatcaaggcaagccatccacagtgtcggcccatcacctcgatgacgaaaccacgctggtgggaaaaggcagtatcgaagacatcgtcgacggcatcacagatacgggtcaaggacgaatagcaaccgatagtggcatctgtcccagacatgtcattgtcgatcgaacctaccaggcccacaatgttcaagaccttgtagggtgccacctgctcagctgacaactcccccgagctaacgaggtctgccaacaagctgggccactcggcacggaaaacatcggcaccagtcaaactgccgtcaccaccgcagacgaccagtgcatcgatacctttcaggaccatgttctttgctgccttcatccggccagcacgctcacggaatgccatgctgcgagcagagccgatcagggtgccaccgcgggacaaccaaccgcggacatcctcccagtgcagctggcggatcatattcccgccattaaccagtccttcgtatccttcgaaaatggcgtaggcttcgcagtcgctgtgaattgccatgcggacaacggcccgcacggcaccgttcataccgggagcatctccaccagaggtgagaacaccgatgcggcgtctcttagccggatgagtggcaatcttgattggctccatattgaattgaaggcttcgacctatacctcaggtcgatagataaaagaatgagacaaaaagtgattaggaagaagaaaacaagtcgaaaaaaaagaagccgataagggtttcaaagctccaagttatgaatgggtggggtgtggaggggtcaaacccaatccggtgagagaaattgggcggtaggtggatgctttgcgtcacagaaacaacttgaagctaaaagttatcaagttggatttcaagaaacataaggaactgttgaggaaaatgagaaaatgctgaaccggactggactgtatttattcttgactacctgtatatgcctccccctgagattacagtggtctgacccttcatggtacctgcgttcccttacattttggctgcaaacacatgtcaccggtcgatttaggtttagtacgggcggtgagatgtcaagttgacgtcactgatattatttgatttgtttgatttgtttgttctgtttgttctggcccctttccaatgttgctatttattgtctttctcacgagtatgttgtactccccatagtcgtcaacctcgtattcattattatgggttcaacaattattgcacaactagtcacccgtgtacccttggcaaacatggtctgaccggttcattcacacaacctcggtccatatgactcgcactaaaggagcgatgccacgcatattgtcacatggttttccctactaatatcgctcctatacctagaacgtgattgctcctgtgaaactcgattcgctcactcggaagcccctggtcctgtatagagtgttccaccagttgtaagttttttgcagtgacacgttgtgcctgcaactccttgtctaatccttgttcgaaatgctcctcatacccctgagatcccacataagaggtatttacaaaatagctttggcgaaatctccaggcaccatagttatggtacaacaaatgatcttactatcgtcggacacatgcatgggccctcgggtaacagcggaactaaaggcgaagagaaaacaaaagttatccttggattcaacttggcatgattaaaatatcagtgtgatgccgtcttggcgggctaggctgacacctatacgaatatggtgtctccctgaaagaagatggaataccgtgccatttattgattcgtatatcttatcgtgttcatgaaccttcaattgcgactatagaactatggaaaagcaagctaataataatatcaaattccctgagaataaaaacaaaacaacgcccccaacattcattaaaacaacgcactttcacgtacttggtccatcctcattatcagaaaagctccccgacatttgtcttacgtcctcggttctcaatttcggcagtgaattgcccaggcattgcgctcgtagtcagaacacggctaacctcaaggtaccgcttgcgaatctcagaccaaagctttttatccttagcagtggtcaactcgggtgatgagtagtaggggtcattccagataaaaccgtccacgagtagtttcagacctgcagggctcttctcgaactttgcgcacctatcgacatgttagcagtatccagcaatattcggtaatagcacccacatattaaaatcgataagccacaggctgattgactgacgagaaaggtcaaatcgatgtcctagcgagcactcatcctctcccgtaatctcatctgaccgtggtattagagacaacaagggggagctaccaagaatgaactctacgtcattgccatcaacgccagctttccagtgtagaatggccagggcttgagccatgacctgggcaaacgcagaggtgtccagctgcaaatcctccatttcgttgacatgtagcgggaaattgcgtaatttgaaatccttcacattcgggtcggtcctgttcctcattcggcgtccgagatagactcgaatcaagcagtgcttgttctctggcttggcagggaactccgacttgtactcctgaagggttggagggcaaagaacatcgactatagcttccctgactgggagagggatgggaaagacacggcttgagatcagagcgaaactctgcacatccatttcccagctgtacaacttgggaatgtggatgtccagtttcatcggattttcaacatcgttcattgcttccttgacagaggcgtgcatcttgaagtcagtaagcagttgggggaccttagctgggaagttgggaagtttcgcgacggtatctgttccaacaatggcgtagactgtaccgcactgtccttgtccgatctccaggaagcgttgttgcgacgggttatctcagactgcattgttcagttcttcgaggctagaggtagttgatatgtaggatttagtcgatagcatgcgtgtcaggatatcttctggctttgcggcagcgatgtgctccggggaaaagagggtatcttttgccaactggaaaccagtgggagcaagatccttgatcgattcagtgatagaatattccgaatcgtcggtactggcctgctggcgatccatagtatgaggacgtcttgctggtcaaagtgtcaagaaatgcatgtaaagtcgtcgtaaaaagtaagagaaaagtaaaggttcagggaaaccacgaggtgcggacaaatcggtgggcgcagagaaaagtagaggtgaagagaagagcagaggtagaaaactgcctatctaggtaatataagaagacaccaactttggaaatgtaccgcccacctttacaggttgcaggtttccatggatagctctgcacagaaacccaaatagtgtgtgtgtacttcggtttatcccagtctgcagtagttcatggctgcaactaatatcctctctgccagtttaccttagctatattgtaagcaaattaaccgcatggttgagggaatcttcgagtccggcagattttggtttcgtgcgttgagcttacagggttgaagtcaaccctggcactttttgttcctcacacgagcggtacaaacaatgacaatgggtttagaccaggcttctataccaccgaaagtctaacccacagtataatctacctacgaggggggattggcgccatcaaagtttttgaagccccagctcttgtgcgcgctgctatctggcagcctagtctagaagactggcaggcttgggtgacgaggtagctatcgcgtccgccggccattgctagccgtccagccccaccgcagtatgatactgcggacctcatccctggggccactagggttacgcaaactgatcctatcaacgctcgcttacaaatgcccactcagtcaaatgagaaaaaattagtggctgttagctatcaaggctgtcaaattctcgctgactcgctgtacatgattatttttgttgacgcagcatgatcaccctctcgagtcaagcctagatgcaaggtagaacaggtcatatttgcattctctagtttcctttttcaaaaaaatgagacaatcgaagagaataacaacatttaggaaactctttttagaatgtaaacactggacctgtgaacaactgtatccatcacatatccaagatggctgtgaatatactaccatcactccttaatgctggacaccacgggatcgcttatattaagcaccacgctggcgaagttctcgtgaaagagctgctgcactctgggtaggaaatactccgtaatcgagttttcaacagtagccggcagcagatccttgtaaatccaatagtgccgaacaaaatccccagtgcagtttatattagccatctcagggtatccattcgcctcggcgcatgaaagagtctttatttctccctctagcgcagtgtcatatcgaagataattcccgaaggcagcttgctcatgagaccattgctgactccatttggagcagtcggggtatcgaatgtcggtaggacatgattcccacgcttcaaaaagcgcctgggttctggggtctttctgtccaataataaatcccgtgttcaagagcgtttttcctttcgcgtcccgattttgtggttcatctgggtcgagtgccatggcgacgagtgtatcgggcgttatgtcccagtagttgaaaagccattccataggaaggtgcggatggcgaatcatagcatccccatcgaggaatataacaaattcgtaagatttcagggcttccttcatcgccgtcactttactccatgtgccatgaagacccgtagggcaagaagtctggatgagcttgtaatcatagccatgtattgtagctataatggtcagtgttgggtggtaagggacatacatagcagagacgtaccgtatatgtagtggcttagtctaccaattgtgctatgatgagcgcttgtcatgttcagtcggctcccattcaaaagttcacctggtccatcaagtggccgggtatcaacgtccaaaataaggagtttatctcttaggggcttcgtaaatctcggcatttgtggtagtgaataagtttttccattctgatcatcgaaatctagggcgtctattgggtgtatgtagggcctgtaaatattttggataaaagagaactcgttgttcatctgcagcgccgggtattccctacaaatggttagattgccgaatgaagtttccgcggaataacgaaaatacaacgtacctcgagatgtttcggacagagaaattgtgcgaggcaacgaaaaagtaaaacagaccgcatagtaacgccgtgagtgttaacacggaaataattggctgtggcatcatggtcagtgctgaagaaaggtaatggattgtttataacggtgatgacccgcagacactgcgcgcccaagagtgtgaaaaacgaaactccaggccattcctctcggctcgtcttaaatagataggagaattgtcacgttctcgtggtatttacgcaagcgggtggaggtatacgaggtatgtgaactgttttgaattggggataagctatgattccttccggatgcggaaagatcattacctacacaaactaccaaacgagaaaatggcaagtgaactgttgattttgctcttaatctaaagggctctataatttttccgacttagatttcaattatgttttacacaaaaaaggagtgctaagaaagacctagatttaatcaaattagtattatgtcttttgcatttgtctttcaaggggtcctagaggtgcccatagatgtctattgagaataatcagccgcaaactgtagggtagggtgaaaatgatggtacctacggggtatatataaaacaaactgagcgctataaaaaacttaggtagccggtttttagctgccaacagtcgctatccactacggtactccacctttttcatcggcgtctccccttctcttgtctacttctctcattctcttctcccgtccccctcctatcttatcttcagtgttcggcgttcggcgttcgatctcgactcaggggataggaccaaatcgcccaaggttgactgctaaatgtttaaatgcttagcctatccagaaatgccaaatttagacactagataccccggtccttgatacccctcggctcctagcccttatctcccttcccgaggtctcacctaaagcttggtcgttgctatgaataaacagacactgctatggttatttacctgattagaaattttattggttttggaccaagcaattcatgtaaataaataacatactctatcattccgatatcggtataccacacagaattcactctattcccacttgggcagttcgatcctttgagatacgatcaaccccgcatgttagctgcatccatatatttactcgataacagctttttttttttctccaaagaacttgcttactctcgaggaaagcatcaatcgcacatttcgatttgttttaccgaattctgggccttctacatcatttgccatggcgccgaatgatacaggtcagcttgactctgccgcagtataattagaaggttaacacagtctagttttcagcctcgttacggctgatccaggcctaccacgacccaatcccaccgaatcctattggcaacatattccacatgctctcgccaacgtccaatcctcaaaattgccaactgaccgagattttgcgatcattgggtccggtatcacgggtctatcggtagctagatccctcttggaacgccaccctactgccacagtaaccgttctcgaagcccgtacgctctgttcgggtgcgactgggcgcaatggtggacagatggctgcgaatgctggagagcagtatatgaatcttgcagaagctcacggggtcgagacggcgggcaagattgtggactttacattccgcaatttggagaagatgcaggaattgattgaagaatatgatgccgtggagttgagcgagatgcaacgtctgcggaagctacgagtctttttgacccaggggaagtttgacgacttcaagaaaagtatcgcccggctggaaatcgatcatccttctaagaaggggatatatacaattttagatgcggatgctgtgctcaaggtgagtcttttcgccggtgtgatctatggtgtcattctgatctttttttctctaggaatacggaattcatggagcatctggaggaacactgcttcctgctgggacagtctggccatatcgtcttgtcaccaaagttttcgcggcactcttggaaaaatacccaggtcgcctgacaattgagacacatacaccggttgagtccgttgagcacatttcaacacttgcctatccgtatacactgcacacttctcgcggtccactacgagcacggactgtagttcattgcaccaatggctacagcggacatctccttcctcacctaagagggcttgtctatcccttcaaagggacaatgacagttcaagatccgcagaatgctgtgccaaatcaaggcacagctgtgtcatggggcttccactaccctccaacctacgatcctgcaacccaacgtcttggatttggactgtactacctaggacagagtgcaaagaccggctatttctacttcggcggcgagcatgcgcgttttgatgaatcaatatccgcagatgacagctttgtgaccgacgactccgtgaagcacttggaagacgtcctcccacgattctttggcaaaaacgacaaatccgattggcgtctggtcagttcctggagtggagttatgggttattcccctgatggtctgccaattgttgggcgattgtcaccggagatgacggggaggggaggggacggcgaatggattgctgctgcattcaatggatacggtatggcaaacagcctgctgagtggcgaggcgttggctttgatgattctgggtgaggatgtcagtgattggctcccagtttcatatggactgggcgaaaatagactccgagagacgctcacagtctcaagggccgtcaatggactaaggtcgaagctatgagttgggcacgccggtcctcgctcggtatgttcgtgactcaaatggaagtgcatttcaattcatccttttgtagccatgatttgtacagggtattcaactcttgtctctattatgtattgatttttgccaaaatagatggggaagaaaatttttgcggtagacccactacttcacttcgcgagcgagccatcacgacttcttgctttacgcaaaaaatattcagaaacaaaaagacatggactcgcggggaatcgaaccccggaccactcccatgctaagggagtattataccactaaaccacaagcccagttgattgaagatcggggagcgagtatcggctcaaggcggcatagagtggagtggcaatgtgtgctctctgtgggtcactaccgtgacacagcggcggacacaaaatccattaaagagggttggttgggtgagccaggattaggagatggtttccaaatatgtggcattgagtgggaagagggtttttcccaattcccacgaccggtcccgtcgatacagcgcacggagtagatctcgacagacagttcatgacgggacaaagcaatcttcatcttttttcggctttctgatttggagctagggatcagaagttcaccatgttgagggtaaatcgcttcccagctgcctttcgcttggtccttgtcactttcagactttaatgaaccactattggatgagatagtaaaaacaacatccagcaacaagaggtggttgatggcggcttccacttcttccctctgagaaagtttaccaggagactcaaggtccgggtacttgggcatattgaatgacacatcaaaggtggtgccgaagggggttgaggaaaggttggtgtgaattgcgattgagaaagaaccccgaggggtcaaaagcttcccatggaaggtagacagcaagggagtaaggaactgtccaatgagggtctccactactggagcactagaggtttgtttctgcctctttgttgaaaagactcttgcggtatatgctggaggtttcaaccctgctgattgcaaaacaccgaagagatccttgagtaatgactggagccagcgtacatcagacatatgcttgatgtaagctagagccgggcgaataagttgatgttcaggaacaggtcgcgttttcggggttaggggaagcggaagcatagtccgacgacgcaagttttgacggtgggcatatgccaataatatccgaatggtatgtgccaaaccatctgcaagcgaagttccttgctgtgagatatcatgttcgggttgcgaggtatcttcatcagtatcaaccaagtccagtaaaatttcgaggttatcggaagcaggaatttgaatgagattctggcgtgtcgtcacgccaaagctagcgatcgctcgagcctctcggactagctcatgaaacagctcctcttcgtaaacagtatcacgcgcttgcagaatgcgatcctcaatcgttgcgttgccgttgaaggtagaacgcgtcggtctagatcttcccgaaagcttgccatcctgtatcacccgcacccggacaaaacgggctttggatgggatcagtccttcatctaataacaaagccccatcctcggctcgacgtaaggaagcaaggccgcggtcgcggaacaccggtgtggctagatttagtcgtggtcagtagatgcttcctgcagtatccgtcacatcggtatgcgctcaccttcgaggaacccatattgcacgcctagcgattgcctttcacgcgggagacgagaaattttccaccccttgtccttgacagccagcacctcattccaatatcgagtctccgacgcgacttcagtttcaagtctagaggcggcctgcagaagcttgtttgccgccgcgttgaaattttggatccgccatccccttgataccgctgatatatctttgattgtagattccggcttcgggggagggttcacgacctcggcattgagggaaccaagaggtgcgacttgcttgaggaaggccgacatggaggtttcggcctgacgcggggcctgcttggatagcaaaagggagacgaagtcgagggcgaacatggtctccatgtgagcttgcctggaaatttatcagttcttgcgcaccgagtatgactttaaaaccattagacagactcacatggcgaactgagtgatctcggcacgccgcttgtacagttgctccaagcgctctgtagagtcaagatcggtcgcatcttggtcactctcgtctaccccgtccaagccatctttttcttcctcctcggcaatcttgtttcggagaacatcttcattcacctcgcgaaaggagccccactgattgttgatttgcgcgatctccacaggcaaggtatctggacgctcacgcttctcggggatagggcgcaaaggcagagtgaaggagtcggccatggtgtcaatgcaccttaataacctccctctgtgaaacttggaaaaaccaatggctcgagaggaaaaataaggaaggacaagtggacgacctaatcgggagctcaattcggtgacgtaagttgcacgtgatcgtacctaacgctgggatagatgctcagactcacagttgactaggtagtttcctcggttggtaaagttgttttcttttcatatcttggcaatatcagtgataccagtaactttcagtctgttagcttggtgggacttaaaagtagccgttgttcaaaatcacgctgtcacagagtacaatatatatctacagcctttgataacctcaacatcacgtatcttaaacacggatactataaacattcaattttctcgattattttctgaatgttcttagttagaagtatgaaggaacctgcaacctaatatgtctacattatactgtatgtctaacctggaggcaagtcccacaaggttctgtttatctacgagtcacgactatccattcccgggacatccccatcatattttctacgcaatcaccacacttcaagcctcccatcctatctttccaattaagatactgcccgctagctttttctgaacattacccccataaataaactatggcgtcgtatctagtgaccggctcttctcgagggctcggattggcgctgatcacccgtctagcaacattgcctaaaaccgaggtggggacaatcatcgccaccgcgcgccaggacaattctgctcgactgaaggaaatttcaagtgcatcagcaggacgagtgcagatagttaagttagatgtcaccaatgaatccagcatgaaagaggctgtggcggcagtggagcgccagttgcaagggaaagggcttgactatttggtcaacaacgcgggagtgagtgactggtccccaaccggactggaaggaatgtacgttgaatatcttatcagaacactcgcttggtactgatttgacagggacaatctgaatgagacgttcaatgtcaatgttactgggccgcatcttgtatcgcgcgctttcctgccacttctgcgcaaaggcgagaagaaaacagtgatcaacatgtgagtatagtgggaaagaccacacggaggtttttatacgacgctaagaagctgaccgaaatataagatcaactactttaggctccatggctatggctgatgcgtttcgacctctgccgtcaccggcatataagatctcaaaggccgccttgaacatgctcactgtacaatatgcacagcaatatgcagctgatggcttcacctttcttgcgatcagtcctggtgtaggtgaagcctttccactcatttgttgatctactaacatcgaaagtggcttcgcaccgaccttggtagcaagcgagcagatcttccggttgaagtcggtgccgagaaggtcctggatatcatacaaaaggcaacgccggagcagaatggaaaatttgtgaacatacatgtccctggatgggagaagcgagagggctcaaatcagtatgatggcaaggagatcccttggtgatccggcagggaatcttttgccacattgcttgatggctacaccgaattatcaaagggaaaagatgaattacctcataggaagtcctccgccacgagatcctatatgccaatttcctttcttattactacttatggtctgtaagaaagatgattcaatctgctagttcatcaagtgtaccctaggtttgtcactctagctacctgatattagctctaggccacattagtctttgttcggctgtcgagttttcacaaaatcaaccaggtcaaagaagctctttttgtagtgccgctgctgggtggtgcgattgacactttgaatgccaaattgttgtgtgtagtccccaaattcccaattgtcgacgaagctccaagcaagggctcccatgacgtgcacaccgtcttcatatattgacttgagaatttcagacatgtaggaaagatagtacacgctcctaggagagtcaaatagctggtcagagagctccagttctgcttctgcatgtaccggaaacccaaactctgataccagaattgggtgtcggaaagtattccacaggtaatagagatactctcggagatacgtcggtgtgatatacacgtaggactcggagcgatacccaatgttccatccgtaaacattctttgtttcttgcttgacgcaatatgggaaaagatcattcgagattgacgggttggcagcgcaagccttgatgccttcctcggccggagatactaccgtagcggtatacggatcaataccaaaaaagtcggatgtgtggccgatgtatttcagttcggatttgctcaagggtttggctccggggagtgtttctaacacagactttgggtactgcttacccaagaatattggatttgcgaagatacccagttgcatttcttggaagcggtcagccgcgaggacatggctagagtttttcggatccttaggcactccaaagttgtcgttgaactttatgccaatcttccccgtggccttcaaggtatcatgatagaagtggtagatctgggaatgtgccttgacaacgtggtctgctcctttgaaattgaatgcgtagagcaggggctcattgaaggtcacccagattgggactcggtctgcataatgagaaagcagaacctagggagtgatccacgtcagacttggatgggaattgatgacttgtggaatagaacccgtacctttccatagttgacaaatgcgtcgacaaaagtttcgttttggtagccggcattgttgtagccaatatctgggtgtcgcgtgatattgtcgctggcgacaaacattaatgggctgtcgaaatgaagcattgtgacagctggctgcaaatgtattagaatactggcatttaacaggtatgaattgaggtatttgggatgtttaccgtcattcctgcatcgagaactgtgtcgatcaagtcattataatgatcaatggcttgttgattgacaggtgttcctggaagagcaaaaggcaaaacccgcgtccaggggattgtaaagctataatactcgacacccattgcagctagtcgctgtatatcttgcttatacaagaaataattttcgttggtgacatagtcctttggcttgctgtcgggtaccaatttctccaacaacgaaggtgatcgaccatccaacccaattgcaccttcaatctgcgccgcactccctgcaaccccaaacacaaagtccttggggaaattatagcagtcggtaggaccaaaatagtcgcgcggtggcaagaccagctcactgctgggcacgggtgtgggactgacagttgtcgagaataacccagtggtggtctactcaagtaagctacaactgcaatttgcgaggaatcccagagcacacgacatacatagttgtgaagatctgcctgtagccacatcgaagaccacgcagcttgtccatatgggtcctttgtgtcagtggcgctgataacagtttgccccggaacccagctgccccacgttgaggtcgaccagctagtggtaaaatgtttgactgcgtctgtataacgtgggccatatgtccgtgtggtcgtcggggaaggaacagaggttgcgtatctcatacttcaattagcaagcgatggtgtacactagttctacgaatttcttaccgaactgtttcgttcaaagtataggagaagggctgaaattggtatttcggtgccacgttcgattgtgtacattgtggccgagcagaataacctgttgttgtcaagtatacttcctgggcctgtatagccacagccaaagcagcaagggaaatgaacggcaatcgcatttctgaggtatctattagacagtttttccgtatcatgcctaggaagcggtcccctcaaataatgattcccctcagaggtcagtgtgtttgccggttaattgtcggcccatggtaatatggcgtcaaactcaaattaaggcttcaattggaacgccaagtgccaatgcgtcacgtaactagcccttcatagcgctgatcgacagtaccgcagacgaagttggtaaggaggagctgcaatgtccgatttcctctgctaggggcactggacagtccccggcttccccgcatcgtgcgcccttgcagatccctatatggggtcgcggatatttatcctgttgaataagaaccttgtcccgaggagattgacaacgctttcgctacatttggctgccacgtcatatcaacgcgtccatattgtaccctggataattggagaagaccgcaatcacgcccatttaggctgctcaggcacaaccgtaccttggagaactgtcattctaatgtaattatttgaaaatttctggaaaatcgacctcgaatatgtcggtaaagagcaggggaggtcgcaatgtggcacaagatattggatttgggtcatagtacattaatgagcggctatattcatcaaactgggcttgtggtttagtggtataatactcccttagcatgggagtggtccggggttcgattccccgcgagtccacttttttgttactgtttttttttcatagatctcaggttattctagtcaagactgaaatgaatgaactatatttagtaaagcagtccaaatgtagtcaaattcatgccacgggatatatttcacccgtctactcctcccaattgaaattaataacaatccggccagccacctctcccttccgtagtttctccacagcctcgggcatgcgattcagtgggtacacctcactgatttgccgtagagcccctcgccgtgcgaaatccaacgccatggcggtatcactacggctaccgacaagggtgcccttgatggtaagattcttgaagacatactggcagggatcggctcctatcgtcatggaccctgcaactggaagaccgatgcacatcacaatgccgccgatacggtcgccgataaacgacacggctgttttgtaagcagcaggggctgtcacaaacactccatgagccccgaccccatcatcaattccaataacagccttggtagagtcggcaacttctttgaaatccacgaaggcctctgcccccatctcaagcgacaatttctgcttggattctcccgtgtccaccacgatcggacgcattcccattgctttagccagctgcacaccttgaattcccacaccgccaccgccgccagggaaaacaacccaagcccccgagcgaaggttagactcaaccagagaccggtagatagtgctggcactgcacataattgggcctgcaatttcgtcggggaccccatccgggatcggtgatgcatatcgtgccggtgataccaagtattgctggtaagtacctggtatgatgagccgcaatccagagcattataaatgattcaagtcagccttacctgtcgtcatcagaccagtgagaattgcgcccttgcagtatgtctccttatcatcccagcaaagcgcacaggaaccgcatgtatccaatatcggtttaattccggctctatcgcctaacttgaaagtcttcacgttggctccaactttgactaccacacctgcaccttcatgccccggagatcgcacaccaaacgctgacatgaacgggagacccagatctccttgcatcatatggatgtcggacgagcaaagtccagtgtagttcagcttgatcaaaacatcatcggggcctacaccagagcatcagtggccgtgaacttgtgtacagtggaatacctgacacttcagtcaagattggggtcctacctggttctggaacaggcactgtttgtacctcgacatggaaatcggggccttcattgatcaccactccggctttacagtgggtgggaatctcgacttgagagtaatctatgaccgaacccatgttccgagaagctgtattgcaagactcgaaaagtgcaaagtgttgtctggaaagtctcaatggacaatatacaaaagaattcacaggagaaagtctaagttccacgaagtcaaaatctggggaaatacaaaatataccgtgatcgtaacccctctttttgttggtctcgtcgtcaatggcttggcttgactgaggagtagggacatacgtgccggataatgtctggcactcgacacctttccacttccaatttagctcatctcttgccgctttttaatcttacaggaaaattgaagccgctaaacactctggaaaagggagactgtaaaccataagaatacattttgctgccaaccaggagtgatgccaatttgaacgatcttgccgtccagacgtttatagaaaaacacttgacaaacaattgagcctgtctattgaacgcacccgacggcacggcaagcagtccatcctcgactgctttaggtgctgttcggtggccaacacaatcgatacccctcgtggtcatcccgcatatccacagttgctttccccgcatttgttcttgacgcactgcagtagagaatgcactttctaacgttggtatacggtgtctaagttgtattaatgatgattggtctcattgacgataaaggtgtatgcgccccactgaagtacgtggctttcccctaatttgagtctgccagagaaaggaaggtgataatcgaagacaaccatcgttttgttccaataggagtgcccatcagctagggaagatcccgtacatatacggagtaggtaggtacatgcgtatacgggggatgcagatacaccggaattcgggaaatcagggaggatagaacagggcaagtcagagcgagaatgatgatatgttggattcgaaaaattattcacagaatgccactaacctcatcgtctaggaattaatataaggggattagagagccgcgaaatctatgtcgacaccgaaataaacgaccgaggacgaaaaaaagaggcaagaaatgttaaaagagatatatcaagttcaatcccaaatcagccatccagtcgaaccgccaatggcaagcatgaatagcacggtcaaaatacccgcaccagccttgtcgcctgaagttatgtcgtagtcgagaccgggcggaattgcctttgggggcttatcacctgcattcgggtttcctttactggtcccaccgtcatcgttagtgactggggctgccacatgcgtgatcagattcgcttgaatgacctcaagggcagccatctgctgaccgaagtctttcgtcttatcccatttttgcgctgtccacttcataccacacacattcttattgataccaccggtacaagtcttggcagcggcctgagcagaggcttttagccgtttcatgactatatcgtatgtgaaaggagccatctgggcagtttgagccatccagcgggacaaatatcctttgaaagaccgctggtcgaccatgcaagtattgacagtctcgcaggctctctcgtacatcacgtcgggtgggtcgtgagagaagaaaacactggaagaattgatgatcctctcggtgcgatctttccatttaggatctccggtctgttcatagcattagattggataatgtagtatcggaaggcctcatcaggtcgagttcactcaccaaattatacatattagctgcgccaagcaagtatactccagcgttgtaagtccattcaatctggttgattggcttgcactcagtgaggtcactagctccatcccagaagcgatactcgggggtcatgaatccaacctcggcagtccagttccaggccttctcagcccaatcgtggtacgtttgattgttggtgtactttgccaggcgagacgcaagattgaaaaatccgccagtagagatggtgttcttataattgtagccgttattccatgtaaagatttgccagcgcaagccacccccacacgaagtagtgtcccaccggggaacttgagtgttgaagacagcctgggccatttcaagccactgaggttggtctgctggtgggtttgggaagttccgctccgctgcagtcatagcagcaaagccccaaaaaacctggtcgtcgtttccttcagttttactctggttggccggcatgaatgctttattctctcccgcctgccagagcataccttgtatcgtgatgttgttccaagtatcatcgcccgtgtagaaccagtaatcgataagggcgttgaacattgcaccggcctcccaccaatagtaaggatccggcaaattacccgggttgtcaccggggttcataccagtgtagtaactcatcatgttgttggcgacctgtttggctgcttttttgatagaatctttgatcgtcaattagtcgttgcacagagagagactggtgacagagtggaacactaacctccattctcaagatccagctctatcgcttgcacagttgaagtacccagtagagctacagccagtagacccatccacgaaggttgtgatgcataattgaacacgcgcatggcaactgatatacgccttcgcctgatagaaagcgtaacagaaactgcttgcaagggtctcaagaagaacagctaagcttggatttctcaaggatgccgttgaaggttggtagcgacacgtctccaaaagtcagtgcagttattggaagaagaggtataaagtgattattgatacgaccatgaggctcaaagtctcgttaggatgaatagtatagcttggccccggtctttggcgagatgaggatactgagagacgaagaaaagccgcccagccagcgtcaagctccccaaaatgaaaatgagaaagagatgtatttgtgggtggagtgagaaccacattccaaccgtctaggagcactggcatggtaacaaggcgtggtttcccaggccatttgcacctcctgtagggggaattgtatgagtgtaccttgaacatccgactgcattaagaaggagtccacaattgcattgtagttatatccaagattggatgacaagatgaggagagtgcaacgcgcaacgtctcatttccatggtttccttattggcgctcccgataagggatcgctgtggcattccagagcagctgtcaaaaagatcaatttgatccaatcgagaagactggcgaatcaccgagaggggcatgattgatcacaggagacagtggataaagggcgtagacaggatggtctagggccgcaaacgaacgagatgcaacaattgacgcattccgaagttgtaacttgtgcccctgtccggtagggcctacgctctatggcttgtccttccttgcactggtgaattaaatgagtacaattgtattcctattttgtctgctgtaagcaaatgccagccgtgttgaaggagttgtacagtgcaggggttaaagcctacgagttctcggcataccacagggggacccaccccctgaggtacggagtacattgcaaggaatactttcccgagctagcctctagccataattctttcaacagactataatcatgcgagtctgtccatgtgcataagaattgacgtggttatttgctaaacgagatgaaaaccgattggcgcctggaagcctcgatacctggatgcctgaaccttatgcccgagacatcaggcataaaccatcacgaaatcagacagcatagtaaagcttaccgcctttctcaccgcttatcactacccttttttcctgatctgccacaatgaagctattcagagatcacctgatctggcaacataaaatatttgtttttattccagattcagattaacaaaagatatgcactacaaaaagcataccccacaaatttcaagaggactcgctttggaagaatagggaatatggtcaattcaaaaatgagtttcgatcattttcaggtttctctgttaggaaattaccttattcggaaacggagaacataacaggtttgccggagtcctagcctagaaagttgtcggagaacacctacaaacaacccaatcccacggtcgtatagcccttccatcgcgttacacaatgtaacttttctatgaacaacccatcgcataaattctttcgatacgagctcaacatcactgttggcgtctgaggaaccagaaaaaccaagtgatcatgttaaggaacatgcataaaatttgcatttcacttgctttcagtgcatgtgcctgcgcagcgactaccggctccgaaccccttgttgccactgctggtgatattgctgctatcccgggatggtacctccaatcatcgaccaaagtattagaagggatggatgtactatccatgccgggaaaagatgtctcctcatggcatcgggttggttctcgtggcacagttatggctgggcttattgagaacgaggtatacaacgagacagaattgttctactcggataagatggaatctatcgctgatccctccacgttcgacgcaccctggctttatcgagaagagttcacactgcacccatccgccggcaaatattttaccctaaagacacatggagtcacatccaaggcagacatatatctgaacggagtgctcgttgcgtcaagtgacgagcagcaaggctcctatggcggccatcagtacgaactgacccatcatgtgaaggaaggagctaattgtcttctcgtttgtgcattcccaaccaactatcttcgcgattttgcccaggggtttgtggactggaatccctacccagcagacaatggaaccggcgtttggcgaaatgtggaggtttctcagactggagcggtttcgatgtcgtcgttccgcatcctcactaattttactcaccccaattctgagcctgtgaaggtcacctttcggactgatttgagcaattttgaatctagtggtcagcaaataatgatcaacggcaccgtcaaagggccagatggctcggtagctgtgcaaattagcgagacatttgacctgaagtcaaaagagaaaaaggcggtgtctatgagcgtgtcaattgtgaaccctgatatttggtggcctgccctttggggtgagcagcctctatacactatacatgccagcgccatcatccaaaaaccccagaagtcagtgtcagacagttcaattcgccaaaaattcgggattcgccatgtatcatcgagattaaacaagtccaatgataccgaatttgctgtcaatggcgagcccttccaggtcatcggagctggttatgggccggatatcttcttgcgattcgatattcacagggtgcagaatattttcgcctatatgttagatatgggactcaatactgtgcgcttggagggaaaacaggagcacccagaactttatgatctcgcagataagatgggcttgatggtcctggcgggatgggaatgttgtgacaaatgggaagggtggaaggcaagtcttctcatactcttgccgcaacgttagaacactgacaaagacagtataacgacgaggccgatggtgtcaaatggggaaagtccgactacccagttgtgaaggcagcaatgctgcatgaggcagagatgatgcagagccatgcttcgatgcttggctttttagtgggctcagacttctggcccaatatccaagccaccgagatctatttagacgctctcaaagtcatggattggcctaatccaatcattgcatcagccagcaagcgtggttaccccgaagctcttgggccatccggaatgaagatggacggcccatacgattgggtacccccgaattactggtacaacaatgaagaaggagcggcatctggctttggatctgaattgggtcctggagttggtacccctgagattggcagcctgaaaaagttcatgtctggtgccgagctggaaacactttggaaagaaccagatgcagaccaatatcatatgtcccgttatgattcgcaattttacgaccggaagctctacaacaacgctctatttgctcgatacggagagccatctagcctggaggactacatcgtcaaatgtcagatgacagattatgaggccacgcgatcccagtttgaagcttacggaacgcaacaaaatgcgacgcgacctgccacggggattatttattggatgttaaatagcgcctggccgaatctgcattggcagttgtttgattactatctcagccctatggcagcctactttggcaccaaggttggagcgcgtatggaacacgtggcttatgattatgagagccagaatatttggttgattaaccactcgctagaaaacagcggaaatcggcacatcaaggtagatctcattgattcaaatggcgaagaactctccgaggccacagtggagagcaacacaacgcctcattcctcgaaggtggtggcttcgcttaacggaattaaaacaatcaaagatattggcttcctccgtctcacactcagtgataccaaatatgaaggtttccttagtcgcaatgtatactggctctctcctaccacggatgtcttggactggtcaaactctgattggtacaccaccccagttactaagtttgccaaatacactaagctggagacactaaaaccggctactttgaatggttcattacacagcctggagtcaccaacagacgatggtttgactcatgctgaggtcctgctcgaaaaccaatctgcagggccggcagttttcattcgtctgaatgctatcaatgcactcaaaagtgtggaaattgcgccgctttattggtctgataactatgtgactctttggccgaaagaaaatctgcggttaactgttgcatttgaaggagatattcagcatactgtggttgaaattacaggaaggaatgtggagaaagtgactctcaaggtttaagcagtgagttgatatgaatcgtttcagatagcccagagaatgatgtgggtttggattaagaggcaacatcttacttgtaatgaaaaattcttcagcgtcttttaagcaaccatttgattggtagaggataatgtttctattcttgtacattgtttcgcttgccgctccgttgtgtaggactcgggtggtgacttcgccctgatataaaatcttgatggctactggtcgcagtatccgatccaggtccatatttagaatccgggccgttggaccaaaaaaacccagtcaggcgcagatgcgtctcactcgatacgaaaaagggggctgtacctctcacttcgtgtaattgacataatgatcaagcgtctgaatcgattggatgcgtagatggctgagggatccgaatcacacctgaatcacatcttgtggcgacggttaggtagtagattactaggtacataactgacgtccacctgtagttcctgtgtatgctacaggtacttcgtactggttacggaaggactccaccaccctatacggaccaatgacctttcttcggaaggttcgggtctatcttctccactcgtttaaattatcaccagtcgcgaaaatgatacctaggctgaatgtgaatttctaatgtaattttgtttttcattggttaatatttgcaggcctgccgaaagggaaggtctcaactctgtacaacaacatagagaaacgagctataagccaataggaattaagtcgagacgtggccgctgttccctgcacgtgccctccccgtgaggacggtctaggtaggaactgggcctgccaccctctccagtcctttctcagacttgcgatcacatttcgccacctactctctgatacgttcactatcggcacccttctcaaatgactggcattccattggtgcccgatggcccacctgatttcggcgacttcgcgaagaatgaagacggggaggtcgatctcgaagcagttgtagagccttggcataagtacgacatcaaaataacaccggaagtttttgatcccatttgtcttggagaagtgctaaatgagagatatctgattgagcataaactcggctttggcggcggttctactgtctggatggcttatgacattcaggacaagacagatgtggcccttcaagtcatatgtttaggggactggggtgaaaacaaatgccgcatgcaagattaaaattgtcagaatgtggaggatacctctcatctagtgatgtatctaaggacttttctcctccctggaaacgaacctagacatagggttctagtataccctttgatgagtccatgcattgattctattttgttgagaaaaatctctatggctagtcgcatgtccgctgctcggcagttactggaagccttggaacaactacataaagcagaaattgtacactatggtaagtcagcctatccctcccacgagaacttatgagctctatcatgtgcaaaatatttcaatattccccagaaaaacggcttactgcaacgcagcttctacaggacccgtcattccgagctattatggacagatatggttgttgatcaaatcttcattctatcgcttcttgctttcctagtttcttatgctctaattttatttcttcatcaccagagctgggtcaacatgcttcgattaaacgggtcggcactgggaatctaaatctacggaatgtccctttcttgaaaagcaaacaccttcaagatgggcaaataaaatagaggaaagagcttccacggactccagaagcttctagaactgtgcttgcgagctgacttagaatggaagggaaaagagagtctgttctcatcactaaaaaattcgggaatgtcgacggagatctcatacaataggtaacttccaaggtaagcattgtctatcattcaatgctgcatatctgctgtcaaatcctggcgccaccctaacctaaaattgaaaatcccgtcaatcttgaacctagttagacggatgggtcctattcgcaactttccacatctatacagatcgatgccccaggcaccaaatccatcacatgactcgaccataatctccccttagctggcccacttgtttatccgattctccggcagcaaccccggttacggcccgttaacgccaggctgaacatgagatgggaaagaaaatcgagcttgagataaagcgcgaccgccatgaaaaaatacaagtagtctgggtgggccctgaaaaatgacgttcctatctactccatagacttctcggacatgcagcctgcgcaatcggattcttgtgcaaccggcccgcgtccatcgcccttgtgtgaggttggacatgtgatcaatggagaggaggaccctcacaccctgaatccaaatcattccaaaaaaccagaagttgatcagaaaattcaatcgatcggcgatgaactggtgcctctttactgtgtcctgccaaatggcgagaagactttcgttattatggcgggatcttttgcagcccttttttcacctctctccagcagtatatatctaccggccctcccatctttggctagcgacatgaatgtttctgtctccctgataaatttgactatcaccacatacttggtaatgtccaacgaggtagataaggagaatatgaagctaattatttctagatattccaaggactcgcaccttctttcattggcagcttttctgataactatggacgccgtccggcatatatcatcgcttttgccatttatcttggagctaatattggcctcgctttgcaagacaacttcacggcactgatgattctgcgctgtatgcagtcctcgggcagcagtggaaccattgcactaggaagcgctgttgtagcggatctctcgacccgcgccgagcgtgggaaatacattggatacgctggaattggacttgcactaggaccgacccttggccccgttatcggtgggctgttggaccatttcctcggatggcgatcgatattttggttcctggttattttgtcggctgtttgcttggtggtgatccttatcgttctccctgagacgtgtcgagctgttgtgggcaatgggtcggtgccgccagcctcgtggaaccgcccactgtggacattgttcgtacgaacatcacgattcgatgacaaccaagggactgccgatcactccaccgtccaccgattgaagaagcgcccaaatccaattacagcgctcttgatagccacacaaaaagagatggggttggttttattgtacggatccttcttatacgcagggtacatggccgttattagcactttgtcgacccagttggcgagtcgatttggattcaactcgattgaaattggattgtgctatcttccgatgggcatcggaagcataagctcccgctgggtagttggccgagtcatggactggaactttcgccgcgaggcacagttgcagggaatgatcattcacaaaaaccgacagcaagatattgaaaagttcaatgtcgaacgagcacgcttggcgatcactcttccactgatctatatggctagcctttgtattttagcttacggttgggtgatgcagtatcgcacttcgctggccggcccccttgtgatgttgttcttcaccggtcttacaaccacaagtgcattcaacaccttgagtactttggttgtagatatcaatcatcaaagcgccgccactgctgcggcagcaaataatctatttcgctgtctattgggtgcgggggccacggctattgcgtcgcctctaatcaaatgcatcggcattggatggacaggtacattcatcgctggtctttgggtgttaggcagtcctgctctatgggttgttttctaccgagggtaccggtggaggagcgagcacaaacaggataaactcaccaatcagacgcacgcttgagcccgaaattcaatctcatgatttgtgtgaatcccgctagagaatgagcgaccggaccagagatgaagccaaccagagccaaccacattgaatatcagatctactctatgctctgcatattatctccgatgtctccaaaccaaaaaagcttgtaaaagcttggcattaggccccaccaccggccttgcactccacaatgaaatgagttgacgacgctagcgccgaggcttacgcatgctcttctataattaaaaatgatagtatggaaataagattgctcagtggtgtccatttttagagaaaatattttctttcattccttgatgtatcagtgactattttcgagcacatcggtctacgctattctctgatctcctatatccctctctggtgaaacttgtatggtttcccatacaccaccttgataagatgcactttctcggggtgtctccctttgaaggagctgtcgctgcactactcctttccggcgtagcacgcgcaatcgatttggatattagcgatgaacgtacgtggtggagttgagattccgcgcctccccggcccatgtcaattaccagagaagttaacttttgatctcataacagaatcgatcaaagatgccgcgagtacctccacttacgctatgatgaaatattattacggcaacgagaccggtcaaattcctggagcctttccagacaaatggtgggaaggagctccactttttatggccctgttagagtactggcattttactggcgacacgacatacaacgaggaactaagtgttggattgcaatggcaatcaggtacggatggggactatatgccaagcaactacagttcttacctggtgagcatcttcagagtctcaaaaggcaacaatctctaatgccgggtatctaccaggggaacgatgatcaaatgttctggggtctagcggctatgacggccgctgagttctcatttccggaccgatcgactgggttctcttggctctctctagctcagggtgtcttcaatacccagatcaaaagatgggatacaacctcttgtggcggtggtctacggtggcagatttggccctaccaatctggatatacaatgaaaaattctatctccaatggggggttatttcagttatctgcacgtctagcccgctacaccggagatgcaatctatctgcagtgggctaacaagatctgggaatggtctgtctcgtcacctctgctaagcaacacaacatggaacgttgccgattccaccgatgttagtaatgattgtgcgacccaaggaaacgcccaatggacatataactacggcacgtacctgatgggggcggcgtatatgtacaactatgtgagaaatgcccttttcaaattcatgttggctttgttcaagtacgtgtactaacctctactgcctacagacaaacggtactacccaagctcaatggctgacagcagtaaatggcctactgaacgcgacaattgagaactttttcctcacgggtggggttatcgaagactattactgcgagccttcagaaacctgcaataataacgaggtccttttcaaaggactgacttccacatggttggcattgactgctctccttgttccatcgacatttgacaccattctcgcgaagctccaaacatcggccaaggcagccgctgcatcctgcacgggccacagcaatggcacttgtggtgtccggtggtataagtctacatgggacgggtggatgggaatggaggaagagatcagtgtgacaaaagtcttcacggcaaatctgatcaactttaacaagacttctccggtgacctcgaccactggcggaaacagtaccagcaatccaacggcaggtgaaagtgacagtgatgcttccagtacaacgactacagtgacaaccggtgacagggcgggcgctggcatcctgaccgctgtttttgtggctggatggattggactcatggctttcatgatgcttggtggttgatttttcgagcacgtgtggacatcgtttacttgcttcctcatttgtgcatttggagttttggcaatctggcaacggattgagtcaatagtgttgtatttatatttacgggagtttcttgttatttttttaattgataccagatttatagacccgtcggtgagagcaagatggttgaaccgactggctattgtatataacggtttacttcagctcacacaatccagaaccatattcgctacatatgtgctggataatgtctagcaactcttgggggtccccttccgttctagtgctcacccccctcgaagaacggcgtagagcactattgtcacagcgatgtcctgcagttacaggggttagtcctaattaggacaagtactttttggcattccattttcaagagcaaaaacgtaaggggagttgtattgatgtcgtgcgagagaagcaatgaccacgttttcagcgtcgagtgtttttcgggcaagtttccaagtgcgtcctctgggtcaatatcgaagattgacggaaactggagccctattttcgcaagtaatcgggcctcgtacatagctccgagtctatacgcggtgatttctgtcaattgctgtaccttttcttttgggtagctgactcctttgagaatttgatccagacagttatgaaagccgatattcggaccggcattgtcggcaccgcggttggaggtaaggtactcttgggcgagatattgtagacgtttgagccgccgtccgagctctagccacttcgctacttgccgcgcatgtcaatgggggaacctgacgcagagactgccattttccttgaatgacacaagaggcaaaccgaggcggttcggggtaggtggttggaagagaactgcttcttccctcaggtgaccttgtcctgactcttgacgatagccttgaatgcggcaatggcatcgtccaggtatacgacatctgtttcaactcgaagattcaacaaccttggaaaaagcttctagatgtgcacaagtagcggtcagttattttaggcagtagaggatacctagtgaaacgaacaggaatccgatcagtgagatagtcccaatggtaaggaaatagatagatgggcgcatgccaatgttcgatattttttgagcgatgagagagatatgtagaaggttagattctctacaacgatcgagatctagtcaaatagctaggtgaagcctggcaaaccaggcaacggcatgtgatcggcacgtggccaccacaacaatatctatacgaaaacaatccaagtttataaatcgaaatttcgaccagacaaggtttagtgccgggaagcttaattgtatgatcttgctccttcctcccctcgactcttctctttcttttcctcatcccgccagctaggtgaagcctggcaaaccaggcaacggcatgtgatcggcacgtggccaccacgacagatataaagtgtccggggattcagcatattcaaatccggggtacaaatactctcttcggtattccagccgcgaaagactagagtaaggtacaaagtgtgtaacttcgggaagaccaaatttcccagagctggctgtaccactgcttcaatcttctggctatatattttcacagttgcagctttcacaaggtcggtatacatctggcggcgctctggggagacgtttatcatgacctcgtccaggtgcatcccacttgatatttctatagagccctacaatatacgtatcgcgacctcatggcgacgaactccacgccagccttcggtggccgttgaatctccagtgaactggcctccgccatgcctttgcagaggatccccagaccgggtgggggacgatgaggatttgctacttggccagctgctgctgttgctgtcttatgtcggggactactagccaactgctggagtaacatgaggtggtgaacaaggtcacttgaggcgtgtttcggatctttcggcgcaagtctcccgaaattcagccgggcggatagtggccattgcgacacgtagtcctggttggatgggaatagaagtggtgggggctgcaatggaataagatatgtgggtcaggcgaagttgcaatgattcgatgtcattctaccggaagaggaatggctacggaggcttgcaagtgcaaattaggaaggcggtactgagtattcaggcagccaagggtatatctgattggactacagtgtagtgctgcgatgaaagagagagttgtatttccgaaggggcagaatacccgactattctagttatggaaggttggtgcctgcaccggactgatggtcaggtgatcaccatatccaacaatatctaataagctgctaaacgtacacataccaagtaacttgcgaggcttaggttcttcctatgcgcattttagtcggtcgaactcttctttgcttgaccagaaattcttgtcgtctacctcgacaaactttgttattttcaggattttgtaattcaaaagaacacaagcaaacatgcaatgtcaatataagtgagggatgaaggtcttggcacataaatgacaaggaaagaaagcaacaaagccattgaagaatgccagtcaagagaaacacttgaaaagcaggatatgaagggctggggaggtgactagaatgatccgcacggcagagaaaatggtgttcggctagtagtcgataacaagagcagtcgcatttacttcaattggtcactggaattaagatctacctggtgttcaacagcagagtgaaatgacgacctaacttccattaccgggcagtgttcccatgtacgcgtctcgatttattgcttcactctggatcgaaactattgacatcaattcggtatatgtgactacgtcgatgtaggcccagccaagaataggagctgatctgtttcaccctagaaagtacgaaattgaatatggcttgagccggcacagcaaggtgcccatctccgtcggaaccctgccacccttgtagccttaggttctggggtgctcatgatgcttcatctcgtccgcttttttatcgttcccctctatatcccgtgggtggattttggcgctgcatcatattgatcgaggaagacgctacaaaatatattattcgacagccccgaacggtcagtgcttttactatcggccaccaatctcagcccaataggcaatataatcccaccccctcttagttgctgatcggcaggcagtcttatcttatggcagaaatgtgtaggtcttgtagagcgattgaaccttctcgcatggaatgttaccgcgcgcgcattgctattttcgatacggagtacaatttcctccaacccctcccaggtcttcattttctatttgagcaattaacagtagtgtaacaagtctgattaatctgaaactgaaatcaatcatgtttttttcgtctccccattacacagatcgtctgtttcgttgatcctatatgttgtttacttctataaaattaccactgagctgagtacactctcgcctttagcctgacaattgacattcttatattagtggagtcattagattctatcgaatatagagtcttgattgaataccaataaagagtgacctgtttgttgatctggaaagcaaaacgcctgttccgaactccaccccgacggcttcggcacgggagacacgccaaaccggcttcacgaggcgtgtcggaatcggtccgcaagtagtctatactatggtgtcattgttgattatatttcagcctgaaaataaaaaaagatgaagagttttccttcgctgagacaaacctgataacggctatggtcggttgtcctcggcagtccactccatagcgggtgtcagccacacctccgattatagccgagactgacatgacttctgactggtcacttatttactctgctagagcactgtgactggatagtggatatctaaagcacctcaagccacagcggaaaagtatggatctttcaaaggtgtctttttgccctagttgaggtcattttccgacaatcagggcccattttacaatggatcaaggattaggccgaagacctagaagactaggaaggaaaaatgtgattgatgggccgaccgaaagagggacatatactgcgttgccttcctcggccagaggcttgtatattcccacaccaactctcggtctattccccaaaccttgatatgatagcatacaatggagtgcctcaatcaacacccagacaaatatgagccagatatcgacttccccattgactctcacagccatcgatccgacgacacaattgaggaaatcgaccctctcgagcttacccgtatcaacacatatcgactgcaacagaaaactaccgtaggctctacaagagggcctactccccgtgacaaatggctccctatgggtgccaataaggattacccacctctgctcccagattctgaagactatgtcgtcgagtttgacggagccaatgatcccttacatccatacaattggtctacatctaggcggtatgttcactaccgtccctccctatgtaaggtacagttgctaatacctcgacagaataatgttagtttgcatcctgtgttatggtacattcgccgggtcgtttaccagcgcggtcttctcggctgctatttctggcctgagcaaggagttcaacacatccgccgaagttggctcacttggtgtgacactctatgtccttggattcgcagccgggccaacaatttgggcaccaggatcagagctgatcggtagacgttggccactgtccctcggacttttcggatgcgccatcttcaccatcgcctgtgcagttgccaaagacctacagaccatcatgatctgtcgcttcttcgccggcctgttctcggcgagtcccatttcagtcgttcccgctgtatttgcagatttgttcaataatacacaacgaggtgtcgtcatgtcgattttctgcatggcagtgtttatcgggcccttttcggcaccgtttgtgggtggtttcattgcaatgagctctctgggttggcggtggataatgtacatctctgcaatcatggtgttcctagggtttgtcctagtctttgtgttccttgaggaaacatatgctccagtcatccttgttcgcaaggcagccaccctacgccgacagactcgcaattggggcattcacgcaaagcaagatgaagtggaagtggatttgaaggagcttctgcggaacaattttgcccgacccattgtcatgttggtcaaggaacccatactgcttttggtctcattgtacatctccttcgtctatggcctcatgtatgctcttttgggcgcataccctgttgtcttccaaggcgtctacggaatgagttcgggtgtcggtggacttgcgtttatcggcattatcatcggcgaacttcttggcggcgtttatatcctcatgatacaaagttcatataagacaaagctggcggcaaacggtgataagcctatacccgaatggcgccttccggcggcgattataggagctgtgtcctttgcaggaggaatgttttggtgagtacccttcttgaaatcctcaacaatatttgatgttctaagctaatgcctaataggttcggctggaccggatacacttcatccatccactggatggcccctgtagcttcgggacttctcaccggagcggggatctttttgatcttcttgcagtgtttcaactatatcgttgactgctatccttcgctgtatgtaaccatgtttctcctgtgaaaactagtaactaacacaattgacagggctgcatccactattgccgcgaacacaatcttacgctcagctattggctgctcattcccacttttctcccggcaaatgatggagaacctaggggtgcaatgggcaggcacaatgcttggatgtatcgcagtcgtgatgattcctattcctgttctgttcaaggtatacggtccatggctgcgggagagaagtaaattggcatgctcgccagtttttgatgttgaaaagaaaccttatgatgtctgatatgaattcatgtgaaaagccaatatacccaattttattttgaagaccagatcgaacacagctctagttagttagttaactagttagtcatagtcttagttatttgtcaatccgcaagggttctttcgttcaactataaatgacgtcaccctgccagtcaatccgccgatccatagatcgatcggattgctaggcactccgcagttcgcgagaatcccacaatctagctaacacctgcgcacttctctcctctcaatatctttcagttcacgatggagtaccctaccaataaccaaataattttcgggccagattgggacctcagtcgctggacctcctccgatgaccgcgtccgtggtggatcatctgtgtcaaatctcgatcctaccccggaaggggtgctttttcacggaaacctcgacattgagacactcggcggtgctgggtttgcttcacagcgcacgatcggagacgaacaagtatgggacctgaccggacacgatggtgttgagctacacgttggtccatcggataggaaacgttacactttctccctgacagacgaaataccacagcagaggccagacggccgtgaacaaagtgctcttgtctgggaatatgatttctgcgagagtgaaacagggcgtgaagtgcgtatctcatggaaagatctgaaaccgacgtatcgaggcaagccggtagaagatgctaggccgttggacttgtcgtgtataaaaaggttccggatcatgattcgaaggtgagttttatgtcaactgagggcgaaacatagatgctaattatatagtttctttggggcacaacaaggtgactttagcctgaaaattcagtcgatcggtctgttccgccagagctaccttgatgatcctagtgtcccgaaagattccatgggccacggtgacgacaagacgggaccggaggaaactgaagagaagaaaagctggtttcgaagttgttgcccattgttttaacttcgtggtcatctccgaaatctaaatgatcctcaaagaattgcatcattgaactcttgtgggatgagtggtgtcatgcgaagaacttcattttgtggatgttgaacttccaaactaggaagggtgctcagtcgttgtaatttaactagcgtttatacaccttcgcaccaaattcttccgacaacgaattttgggaggctacttaggtaaaccatgcaagataattccttacaaatgagccttttttcgagagccccggaagggatttggttgtgggaaatgtgggtttccctcatctcccattcgaggctcttgaaaaacatggatctccgtcgtcttctgtattccgatgtgctccaaaattttctcctgactcgaatgacgactatcatttcggttgacttctggctcgatatgagaggcaaacagcgaagcgtctggaacaagacggataagagggattggcttctgtcgaggagccgactctgtgtgcgtgtacgccgaacccttgcgggagcgctgcagtatggctgcgtaggactgtcggagggtaggcaatgacgagcagatgataataacgtacatctaatatcttcatgagctagaattgcttaaacagtacatgagaacttacctcaatcctagattttatcaacttttgtcaacaattcggagaaaatccctgggggtatgacttacgtataccacatagtaatgtcggcccatgaccctatatacgattagtcggtgtactcgtgaaacatgagtcgaggaatacatacaggtaatgtcagaatggacaggtaggttcttgagcaaaacgcatttgaccagcgttgccgccgccgcactaataagtcagcttgagcctcccggggtgtgatgaaaggagtgagatacaaaataccagctcccatgactgagatgatcgcgaccttcatcttaattgcgagctggacgtgccaaaagatataagccgggaaaacggcgagggccagatcgttgaatgcattgaaggctgcctgggatgttccagcaaccaactgaaagttgagactgaagcaggagccatccaccttcggattccagatacgctctgggggtcggcagaatccaatgatgatcacgatagctaacacattccacgctactgacaccgccatcatgatatataagaaccatcggcgcgctgcggatgcagattgtcccataagccggagcaggaaaatggtcacactcatcttaccagttgtagtgctgacaacagagaagttgggtgctatgactgtgtacttgatcgcctgaatttgccgattgccatctggaatatcgctcaaatggcgtcctaatccgtatgaaatggcgacttggaccaatgaggagcataccagagcatttgccagtgacaaagcgataaagaagtcatcccacccagcgcgcctcagagccacacgtgtgtataaccgcagaccgacaacgaccacggcgacaccaccaaaacaccaggaaactgccgtgatactgacaccgggatcgctcatcatctttgtcaactttgctgccggggtcatcaccacccaaaggccttaaaagcggacgggaaacctcgtatagcgaccataatgatcgcaacgcataccccttattcatccatttcatattagcaaaatcctacagagtactttggcgtacaacagggtactactgtgacatcctgatgagtacatccctgtcattaagccgtcttttcacagccaacccagtgaggaaatcccattggcttgaaatctattggcgggccggggaatgcggtccgggacggggtcatcgacctagcgtgctccacacaatcctttctgatgtcaaatgtggtgaacaaggcgttgttgttgtttttattcccatatctgaaatatcacctttattgtacaactctattgtacaaaggtgaccgagatgcacttcacaccctcatagcgttggctccaaatttaactccgtatagaaagaaaaataataagcggcaaacttgtgggtacaacgtccgaaaatcctttccgacttgaaacgatcgtctagacgccgtacagtatggcactacgcttggatacttggggctagaacctcgaatctcatgagccaagcaagcacacccacagcccaatttatccaccgtgtcagttataaacatgattcgcaaaagcacccaaaaggcgggaaaaaacggatcaaagagtccagggatcattgcaaattcgataacctgattttccttttcagctgctattatacacctttgtcaagttacaactcatcctcttatagagatatctctatccataacactgaagatggcaaccgctgtgtcaaacgagtcattcgaccagctgcagcaccaattgaagcagttgctgggagctttccaaagccaacacgaagaggcagatcgcgtggccgccctgaaggcagcacagaatctagtgaatgcactacaaaagccgcaggattcggtctatcatctggcctattctgtaaatattgtatcatgcagggtgatgatgatatttgtgctaactcgggctagcctactcatgccatgtgtgtgcgcattgccatcgacatggatatattcaccacactgacggagcggaatcggccggtgtcgctcgatgaactggcagccgtgagaaatgcgagtccaattctagttggtatgttcttgtctacggctttttctattttgcatgggtgactgacgatgaaccttctgtgtagaacgagtcttgcgtatcttagttggcatcggctatgttggcgaatatgacacgcgcgtctacgttgcgaatacaatgacacgccagctgactgaccgactcagtatttcggtaatcaaatttatatttgatgtcggcatgcctactcttgccaaagtccccgagttccttcgccgacaggactaccgaaacccagagggcgctaccacaggcccactacaatttgccgagaagattgacgagagtctttggacttggttgccgaaacatccggagtatcttgattcttgcaataccttcatggagggtgaccgcggcgcccggcctagttggcttgaatggttcccggtggatgagcgtcttctatgtggcgctcagaatgatgcggagacgcttatggttgatgtcgcaggcggtcgaggtcatgacctcgcagcattcatggcacggtatccgcatgtgcgagggcgcttggtgctcgaagatttgccacatgttttggaagagagcaccgtagatgcagagcgcattgaaaaacaaccgtttgacctttttaagccacagccgattcatggtgggtctcgtactctgatgcacgatttggacaattattaacgtgagttccaggcgcccgtatttattatatgaaatttattctccacgactggtctgatgaggagaatcatatcattcttactcagctggctggagcaatgaagcagggttactcaaaattgatcatcgaagagtttgtgctggctgatcgtgacggtgttatgttaccggcgatgtgggattgggaaatgatgattttctgtaatagcatggagcgctcccagtctcattggactcgcttgcttggagcagctggtttccaggttatcaagttctgggcacctcctggcgatgggcaaggcatcatcgaagccgaactcaaatagtttgttaggagctatgaggaagcgagtttgaactatcctgatctttttatttagtttgacaagtcacatgtgatattcgctcgatcgtgtagaaggtaagatgacttatcaagctctgatttccaccctaacatcttgtagatctcaaactatatttttcgtcgctcttgcgcgttgaagaagctattccgataacgcatttccaaccgtacaaaggcagtaaaatgcagacatctttcgacatcaatattagtaatagtgattaatttccaacctcattcgcacaagggcaaattctacggtcaggcagctctaaaactgagagaaataaagggtctatacagtcggtataacctcaacgcttggatatggccaaaattaccgttgtggggtgggaatagaatcaattccgcggtttaactacggagtacagaaaagtatcagcactctacttctccgtaatcgtgccaggcgcccaaaacacataccgtgtgttggtacgccccagtcaacgataattttcactcaacgataaaattgccaaaccaggtgccttttgtatggtatactaatacaaatagtacttatcatacaaaatcttaatatccattttctcgatcctctactaaggcaggggaataataggtctatacatattaattaaaagggctttagtttatttgacatctattcgaaatatcaggtagacttaaaattataagatattcaagtttttacatatacacacacatatgttatgtggtgctttttaaatatatttgtcatacttctatagttattctgtaatttagtaccagctacctgtaagcgaccgctcggggtggtgacgcatacgggttatagtttgctgagcgtagacgaatcaaagtctgtcctaatgtgacctactacatatagggggtagcctagtttatatactctatataagcctttaggcattcgaacctaccccccagcctacctggttggggcgcaccaacacacggacggtatgtgttttggcgcctggcacgattactcatggcattaggcggtgtagaaggcggtctaaaatccgtgggagctggacagttcacccaaccggtggagatcttacgtgatttaaggccacgggttgggtgaaaaaacgacgcaggttgggtgaactgtcgtctcgctcgtccgctcatcccaattaggctacgaaaccataaaaatcaggcactagactgttgatagtaactagttaactatgtaccttcgtagatatatattactcaaatttgggattcggctctgtgacataacaatgaactaaagatcttccttcaattattcatgcactcactgctagtattgctactccaggcctcatgaatccaagtagggtttgcatgaattttaaaccagtgcaatttgtactctattgtcaaattctaacaaatacatgatgatgcttttaacaaatcgaccaagaacaccccaaccccagaagcaatgtgaacgctcaaaagaaatctgacatctcaaaccgaaggtgtagtctgttcattggtgtgtgcttgcggtctgtaatctctagtagacgccgtagtccgagatgttgtggaggtggtgtggctgtgatagtttgaaagtgacggtgcgcttcgcgctggaaagtattccgtctccggctggctggtgaacatcatggaggagcggtcaacctcaacgttggtggtggattttcctttcgtggtcacaaggggtaacttcgagtacgacggattggaatgcaacagcttccgagccgcgattcgtcgtgtctttgctctctggcgcatacaataaaagagactgacgccgctaaacagcgagatcatacagacgccaaatataattcctgttatgttacccctgcggttccattctgtattgttagtatgatgggaatcttgcgcctagtgggcttgaagactcactgtccagtgccgctgcggcactactcttcgcagttgaagttgtagtacttgtcgtagtcgaagcgctgctagttgtcgttgatgcacttgtggttgatgaggtgctgctggttgtagccgtggagctgctggtacttgaactggtactcgaactggtagtcgagctggcagatgtggttgtagatgttgtagatgtagatgtctcggatgtagaggtagatgttgaggatgtggaacttgcggtcgtagatgtcgtagatgttgttgaagtagatgttgtagatgtggttgtgtcggttgtggtatctgtggatgtagtagagtcggttgtcgcagtggtgtctctggcccgaagaatctcgccatatctacgtttcccgtagagatgggctacctcactcggctctgggtcttcccataaatcaacggatgtcgctgtggctgagatccatggtgtggtttcagaggcataggggtgaccgagcacccgagagcacagcactgtgcaaagtgcaaataatagaaaatgcatggttcttcaatcgagaaaacagtacggagtagacaaagaaagaatgaatgaacatcaccgaaaaagaatcggaataatttaagacttgctttggcatttgatagtcttgaaaaaaaggccacgcggcataactagacacacgcgtaagacaatttccctataaatctagtctccaattatggttgctgccatggcttagtgtttatttttgtaccaagcgttgtggaatcagccagtggacagccggtgcaggaggcttggttgaactgcacacgcatatgccgcgcggcaccccacaaggctgattttatggttcaatctgtctctattttttggtcagtaatgttctactcaaatttcaatgttttcaagtgaacagactcaacagagtacaggatcctatcttataagtagtatagaaaaagccgtcccccagtcggctggtacatacgatctagttagttacttactgccaagagacactaaagtattgcgccattgagagataaggagattctggaaaagaaaaattgcctgatcatgatcattctcgttgaaattcaagacgtagagatttatctaaatatcgaatgttttccaatattgaagtcaaaaatatcagagaacttccgatttacgcctgagatatcaggcatcaaaaggtaaaaaaaggttaactaaggtagaaagatccaccatcaatattgacgccaagcgttttggtaggagattgtatttgcacgctcgctacggattaatgtcgtatatcttgaggatatccctggagcacaatgacgcagttggatgctccccaaatacttcccgagcgccacccgattccgcatacgcttaatgcctgtttaggaagtggggaatgaagccacatgtctatttccactaacttcagatcatccaagtaattaatcccaatatccccgggatcgtttttagtgtccgtcagcggcaatgacgcagttgagcgttgtacacgcttcccttatgaaaggaattactatatgtaggtggcattgtgacaagaccatgtggctttctagttacagttctttacggaatgtaacccccgcaaattttataatctgctgatagtttctccatatgaaaatataatgtagtatcattatctaaaatacttcccgttggagccatcaaaccccaatgagaagacccttgtgggttacatgggtagtcagctgctgcatggaatgtaattgctaacagtttctccacaaaggacatgtttgtatgtatgtagacagaatcataaatcttttcttccgttcagattgtatagtttagcaatttgactttgagttattgtctgtatacaaacatcgtcaagtgtttgatctgtaggttaaattcgggagattactgatataaggccgacgaggtaaatcatatttcactacatttgctgagctattataaaaaacctctagtccaaaatgcgtgaaaaaccacgggttacagctgctttagagtcagaaaatcaatttaaaatcaatggaaatgaggctgtgtattattatggatggcgggaatgtagaacttgaactagcacagtatagagggcaactgagtctctacttgcctgaaaaaaaaaaacaatgttagatatatacacgccaaggtatcattgatgttgtcgtccttcgaaatgatgtccctattttacttctataccttcgtacgcatgtatatataaaataaatgagacactactaccctgcaacatccggaggcccgtaaacaaaaaagaaacccgcatcatcagcaaatttttgatcgtgtggacattgacgcaccaactctacggactttccgccccaaagctccgtaacaaccacatggttccttgtaaatatggaactgattggattcggagagatagggaacaaacatcacactcattgccctaatgatgaaacttcgtaggtcagctgcgagaagtctccgagtgatttggtgaatcaatgatatatttaatgatctgacccataagaaaaatgaaagaagatgccagaaacaaaagagcagctcaaggtaaactaagagaatttaaaaacaatgacgaagatacggttcattctgggtgtgattactttactatctactctagttcatgctgcgtctacgggaaattatcacatacgtcgtgtcaaaagacagtcgacagaccgactcgtatttgctcactttatggtaaatattccgtcgagtgccttatttgtgttggatatgtactgatcatcgaaagattggaattgtgagcaacagaaagagcgcgtcagactttgacgatgacatgaagcgggccaagtctctgggaattgacgcattcgctctgaacattggcgtggatccctacactgaccaacaacttcaactggcatacgaatcggctgccaacaatgacatgaaagtcttcctatcattcgatttcaactggtggcacattgaacaggctactgaaattggccagaagattgcccagtatggtaccaaacctgcgcaacttgtcgtcgatgacaaggtgtttgtttcatcattcgccggcgatggactggatgttgcagctttgcgagccgcagtgggaagatcgatatttttcgcacccaatttccatccatctactggaacagacatctcgccagttgacgggctattgaactggatggcctggccaaacaacggaaataacaaagccccaactccaggtcacaatatttctgtggccgacggagatgatgaatacgtcaacgcccttggcggaaaagcttatattgcccgtcagtttcatttccattgaatttaaatcgattttctgactcttaagcagctgtatccccgtggtttttcacgcatttcggaccagaggtttcttatagcaagaattggaacttcccatctgatctcctatggtttaacagatggaatgagattcttgcgttgaaaccgagatttatcgagattgtgacatggaatgactatggagagtctcattacattggtcctttgaactcaacacatactgacgacggggcctcaaaatgggtcaatgacatgtaagaatatcagtccctcatccaaaggaatccctatttcaactcgaccaactaacagataactacaggcctcatgacgggtggcttgacatttcgaaaccatatatcgctgcgttcaaagcaggccagtcgtcccccgacaaccatatatcatctgatgagctggtgtactggtatcgacctgcaccacgtggggtggactgcgactctacggatacttgcatggtaccagcaaacaatgggagtggaaactatttcatgggtcgtccggatggctgggagtccatggcggattctgtcttcgttgtttcgttgcttacatccccagccacggtgcaggtcaatagcggcgggactgtctataattacgacgcaccagcaggtgcaagtgcaaaggaggtgccgatgggagttggctcgcaaagctttacggtaattcgtgatgggcaaactattctgtcagggaccagtttgaaggagattatcaatgactgcgtgtgtggtctgtataacttcaacgcctatggtatgtgaaggtattaccactggttattaccccatttctgactttgatgatagtcggaacccttcctgcgggatttgatgatcccctccagcaagatggactctcggcctttacacagggcttgcgtatccatacatgtcaaccgactccctcattaggcacagtacccccagctcccccatcttcaagtacgagcagcaggttgccgagttctcctccaacaacacccccgagtacaacacccccgagtacaacgccgcctgcaagtacaacgaccccccctgaacaatgctctactaccacatcgactgttgtgatcactgttacagtcactcagactctcagtccatcaccttctactcctccaaacggtggcagtggagataaggtctgcattgcgggaacaggatcggataactacgtaggattatgttccttttgttgcacctatggttattgtccagctgggccctgcacttgtacggagtatggggatccagtcccgtctccaccatcaactggagctcgtggggcacctcttgtaggcgaagacgattcgtacctcggtctttgcagttttgcatgcgatcatggctattgtccccccacagcctgcagggtagtttgagcgcgagtctcaaaaggggtgagatagttctcttaacatattatcgaattgtgatttaaaatcataacatgacttgtcgctggccgatttaggttccaatgtattcaaggctatgtcagatatgtttactgtgtgccggaagaatatattccaactgtatgaattcatgaaagtcctcaactaccaactgtaacaataacatcaagctttattaaactagattttgtagcaatcccttttgtggagattgaaaggcaaggaacctcagacaaatggagaatcaagacaaacactatagcattgccagcaaagcttgaactgcagcaaaggctagtacgagaccagcaggtcctgaccttccagccgcactcgccgccggagttgtggcaatggtggtagcagcagcagcgggggatggaacgccagtggtagtaccatttagagtggaatttgctgtcgctgcgaccgcgctagcagtggaagttatggtaaccgccaacagagttatctggtcccaagcgacggttgaggtgctggtgccgggcgtaccagctgtccctgtaacagtgtcggtacaagtataagccccggtggggagatcggtcacatcgcagacaacgtggttatatctgttgaatcaattagcaatctattatggcttgcagcaatagttgagagttgagtaaacgcacaggtcggttgcggaacttatcaagtattcgacgctcgttggagctgcggtaaaaaaaagcccagggcccataccgcattctgagctattggtgccattcggacaattgatactgtaggtagttgttgctgaatgctatttgaaatttagttcaatgttcgagaatcattcccattgatacgaaccgcgcccaaaacttcacccaccaaggattgggagtgagcgtttggaataaacaaagaaaccacagagtcgttggcagcaagtcccagcgttgcaaatgttaggagagcttgcaaaagcattttgtcctagtctttctctgtatatggtgattgagtacaagacaagaggagattttgccgggcactggatcaattaggaaagtcagcattagaagaataaattatagttgtgatgtaaacgttatcatcatcattttctaaggctgtcgtgttgttacggaaacttcttgcgtgttgtatatcgaaatgatgaaactgccatgtcatacggatcaaaagccggccatcatcttacattttaatattacaatttggcgctcaaagcccaaaagagagagaagaggtgataatgagaagtgataatatatcctagtgattggaatatttatcttactttgtgtccacgctggtgaatgcgccatattcttcataacaggggcatccatatgatatcgtcattattaccattcacgaatagagccatctggtccatagaactccttgggctgccaaggctctgtctccttgctgattttccgtaccaggtcttcgtcaatatcaattcccaagcccggtttagaaggagcagccacgtatccctcagtaatatcgaagactgtcttgtccaccaagtagctgttcagatcaatatctccagcttcaacattgtagtgcatacccagcgacatctcctggatgacaaaattaggtatcgacacggccacttggagacaggctgccaaggcgataggacctagaggacaatgaggcgcgatagcaacatcgtaggcttcggccatattggctatacgcatggtttcggagatacctcctgcgtgggcaacatcaggctgtaggatatctaccgacgaatcctccaagaatctcttaacttcccacctggagtataagcgctcgccgaatgcgataggaattgtagtatagtcggaaagttgctttatcgcttcggggtgttcggacagcagaggctcttcgatgaatagagggtggtaaggttccagtgccttagccagctgcttagccataggtttgtgcaagcgaccgtggaagtccacaccggcatcaagacccagagccttcacttgtttcactcgttccacacaggactgtaagacggcgggcgagtctagccagttgacatcttcggtggcgttcatcttgatgcacttgaggccttgggcgattcgttcttttctattgacagaggttgttagaatttcagtctcctttgctctcctttcgtttcttgcaactcacgctgcagccaccacatcgcttggtcggtcaccgccaatccaggcataaacctgtaccttctggcgcaccttcccgcccaggagctcgtggactgggacacccagcttccgacccttcagatcccacaaagcgatgtcaatccctgatagtgctgacatgaataccggtccaccccggtagaacccgagccgccatactgtctgccaaatgtgctgaatgtcactgtcaaaggtggttagagcttttatctgtgaagaaccatgattcaagcatactccgcttcatatcccacaatgcgagtgataatttcatcgagtgctccttcgaccgcaagagaatgtccctccagtgtgccctctccccaaccgaagcgcccctcatcatcggtgactttgacaaacagccagcgaggcttgacacggaagtgctcgatggacttgatcttggccatggtgagttactggatgaattcctcgtgtattgaatgattccggagtaacaatttgagtgcgactgaattatattcgctgttcacgacacaaccccacaccatgaacgcatcccacgcgggggcctcgggagaagtccgaactgattgccgtggtatcagttctatgaggggattgatggttgaccgttaatctttatagttaaatcagccaagtcaactcagcccatatgttccttagagatgtcgaatataggttgggagcgtgagttgcctcgtcagaatgagatattgaaagcattcactgaaacgcaagctaacttcagggctacatcgagctataaattagatcactgtctgagcagctcgttcccattcaatgacatgccaacactatatcatctcccctggttatccatgaagtccacccccacgcggccattctccgatgcggggaacctcgaaagtacggtttttgccaggcagaaaattagtaagaaattaataatccacgctcatggccgcggggaataggtgagaccaaggcggtaggaaaggcgttaaagacaatatgcgcgatggcatcgcaaacgtagaaaagtctcaggaaaagacaattcttttcttttggtcgttacaaaatgtcggatcgaattgatgtcctcgtctacggcttgggagcgtgagttcaacctcttcataaaaaagatgatatactaacttctataggattggctccttctatgccttcatcctgagtcgctccgaccgcgtgcgactaacggtcgtggcacgttcaaattatgaagctgtccaggcaaatgtgagtgcttactagacatgaggctattctagtattaatatctgggccccaatagggaatcaatatcaatagcgagaatcatggccagcataactttcgtccacaccgaggtatgcgagatatgcacgattaaaatcaagctattttgctgacaagccaacaagtggtaaaatcaattgcagagatttcaccagtcgactatgtcgtatgcgctcacaaagcaatcaatcaagatgatgtggtagctcagctacagccagccatcgacagcaggactaccattgtcatcatccagaatggcgttggtaacgaggaacccttccgaaagcacttccccaacaacacgatcataacctgtgtggtgagttctctttacatcataatcccacagtctcatctgacttctgcagacgtgggtaggagtcatacaggcaagtcctggaatcgtcacgcacggcaaatccgaggctacgcagatgggcttatttcccaatcccaaggtcgaaagccaagtcgagcaacaacgccttggaacatttgccgatctcctccgccgtggcaagactcaggtccaggttgctgaggatatacagacctatcgatggcggaaggtggtttggaacgtagcatggaactcgttgactgctctcactatggtggatacacaaacttggttgaagtcatcagaagatgcaacgccttttacacgccagttgatgcaggaggtcatcaacatcgcccgtggatgtggtgtacccctcaaggatgatctggttgaccagcttatggacaaaatcaattccttgcccggcattggaagcagcatgcagacggattgcaaaaatggacggccaatggagatcgacgttatcttgggcttcccagtgcggaaatctcgagaacttggtatacaagccccctttttggagaccctctacgttcttcttcgggcggttgatggtcgactcagggccgcgcagtagatcatgatacttgatttggcttcacctgatgatgtagcgctcgctatagagttcatacacctgaagattgtagaaagttatttgaattgtccgtgatagtcgaatatacttgagacttaagaccaagactccacttcccaacggaggatgccatctatagcatactacacacttctagtctcgactgacgacgtcgattatataaatagggctcatgcaagatattcgacatatcgcgatctccggcaacaccaaaaacaaagcccaaggagggcaatatgcgaaagaaaagtcgctccagataatataaacacggctccggatattctacagtgtaccgatgcgacgtcccgctcatgacgtcgaaaatgcaagtaaacagagcgagggccagcctgcttgttcgtccgtctatttcgggaggttcatgaaagtcagaaacacccatgcgcaaatgagtatataccctaaaaatattatatagcgtattgaaatcggaaaaaaagtcgtagcacatatgacaggatcatcagggcggagtaggagaggggggacttcgaatctcctgtagctgaattgaggtggtcttgtccacctccacttctggggcgacgtccggcggatcgggaggtttgatattctctggttcctggtcaacggcgaacctccagcggttatcggcacccaagaacatgcggaaagcgtagcgtttgttcagggatacgagatgagcatgacgtttggcactgctccaggtatgtgtatcggtaaaatcatgaagcatttggctgtgcgaaatccagggaatgatggctccaatggagcgcggcattcggggtgctcggaaccggtcatgtcgtgttccgaacactaaaagcacgacgatcgtgtcgaaggcaataatggctagcgcgatggcaagtgacggacccgacggaaccatgctccaggtaacgcgggtaatggtggaatttgtggctgggaccgggtgggcgaggggttcgagataaatatcacgccaaatcgagaagtaggtgctatagacccattggtatacagtgcgagtcatggatgtcagaagcgcggggttgagggcgctaaagttggggtcttcgcgttcgtagagacgggcaacaaggaatcctgcccaatcataggaagagatattgtatgtcccattctgcatgctagtattgcctacaaagctgctagggatagcagcaaagactttgttgaactgaccgagacccacggtggcattgtcgtacatagttccttgggtgacggatgttgtgggaacaggttcgtgccaactgatctgtcccttctggtcgaaagcaatagaatagttttgcaacttcgcctggggttcacagtgcaaagcaattgtgttggcatccgtgattggcgtgtccggcaaataatcccaacggccgacaaccagaacggtcgacgtctggcagatgtccgagtcctcgacatcatccggggacaggaaatggatagatagtgagattccttcctctttgcttttcaggggtggcatgcgtgccgtgcattccacggaggaattgccaaatagttcatagcgccactgttgatggccattggctttatcatagacaagagcatcggatgaaaggggctcacacttgagctcagctccaactccaagcgttgaggcaccgtaagtcacatccggattgcgattggacacgtgtattgggacaaaagattgatttgggctagtccaagagagcatagggactccactgctgatactagtctgaatcaaatcatactcagtgaattccacagcgaagtcggtccgccaaaatattgactggctgtagttcattgacaaatcgctggtttccaatgttgaggttgtcaattgttgagtgaagagcgcacccgcaacgacagtcaaagccatgttgacgaggcacgcaattgatacgagaacgagcaaaggctgccggttgcgtactgccttgaagaaaatggcgagcggactttgggacgaatagttcaatgacaacgacgtccttgccgaggcgttgcctcgttgcaggtggacccaaggctccaggacgctgaggttccggtgaatagaggtacatagagcccccacggacgatgcaacgacggaaggtaggaaggaaaggacaacctggaatgcacttgaatcggattgggtcaaatggcggaagcggccgtttcgaagtaaagatgagaccactaatccgatgagaataatgactccagctagcgccaagaattcaataagaaagaaaggaattacgagaaagtgaggcatccgatcaacacgggtttgtaggttctctccaagctggacgggggagcctaatgatacagtcagttataattctcgacgatgaatgtgattcgaagggtcggggtgatacaaaccgtcttcggtgagaatatccagcctgttgccagaaggtcccggtcgccagtaacatcttgcattcttgaagatacgacgaagttgccgagtagagaattgatgaaattccgccactggctgtgcgaggatgttggatgggtggaaaacattaacggcaatactacacatggcaccaatagaccctgggtcgctttggagaaatagttcacgagaactatacatgtaaaggaggtacaccgtggtcaaagtggctatggcaagaatgaactcagaccaaagggcggcaaaggtaacgacagcgattgcgacttggttcgacaggcgctcggcagcgaggatgctgggtgcactatccggatcaaacaggcgaccgagtgtgagcacgaacgtctgcttaacatcacgcgcaatcttggattcaaattcggtctcggtcatgacggtcgatgtgtcgagcaccagcacaggctggatgtctcctaactcctggctgatgataggcagttcagtcactgtgcgagcgcccgtggtagcattttcacgaatgaagagcatgtcactagtgaatggagcgcgttgagagagcagggcttggaagtgttcaatgttgaactgagcttttgtcagcgcgcgggtggtggctcgatcgactttgatagatatgatggagctgttggagtgcatggtcacgcgagcctccgctttgtgatagaggatatcacaggcaaatgccataccagacgtggggaaattggtcgaatctgggctggtcgtattgactccgatgagcataccatacagatcatacggaccgcagccatgttctgtgaaggcctggattcggtccggaaatgcttctttggcagcagcactgatcatcggctcccaatagcgtacttgcagataatcggtggtagggaagaagacactctcgtattgaaaatcaacggtacactttgaggcgccttcgtgtgcattattgaaatcaataccagtggcattccatgaaattgttggatatgccgactcgggatcattgatagcaacggtgagcttgtccccaacagaaacattctcgcaggaaaggtgcgcccaatacagcgtctgatcaagagtccacattatgctctcgtcttgctggctgtcgggtatctccacaggcgccacggcatacttgggtgatcgggaccggcccaatagctcatgtgagagaaccacgtcgccattggcttgcgttgagatccagttcgcttgtgtgtccaaatccacaaggttgggccagctttttacggtcctgtcgtcgatcaccgtcacctcgcgtagctcaaataccgtactctgtagagcgggaagaatcattcggattgagagcgtgacaaatgaaacccagagcacaatccaatggcggcggattgcagcattaatcggagtcataaaactttggccgaagttgtagttgatgaagaggacggtcgccggcgctccctcggggcgggacaactggaagtatggttctaggcggaggacatcaaaatcggtcacggtccataccaagacgagcacgagggagatgattatagggaggtaattgtaggcaaaagattgtatggcgttgacgtcttccgtgtagctgaaaaagaccaagcccccttcgcgatcgctatactgccgcaacccttccaggcccagcagcatcgttaacatcaaacatataagagaggacaggtagggcgggcgcagagccattgggcgccaacctcgatgttgagggcggactcggggcaaaagaaacggggcaaaacgacctagttcgcatctcgattagcatactcgtatactccatgagggttcaatgaagaatgcgaaaggaaaggggtgtcaggcgaaagcagccactcaccaatctgtgatgcccagcgccctaccccatcactaccggacatgctggatgaggtcccgaaggcggacaatgtacttgatacaaccgaagggcattgccaaatcaactttcaaccattcaacaaacctctggtgccagcacaacaggccatgattccacaaagggggtgatagaccaaggttcaacaagacaaagggaaaagagagcactcggccgtaaaaccagatgaaaacaatgaccaacccagaaccaacaaaatgagatggatctcagaaacggatctcagaaatgacgaaggagaagaggagaatcgattttgttgtggctgtgctgtctgtgcctgtacccacacgtggggcggagttatcctcaacaggcacgatcgactatacaatcattccgtacctatattgtaggtgcaaatcgaaatctcttttgactcaagaatccaactaatctggaattctcctatgtgaaaatgaagtttagtgagatttcaattgatcttctagtaggacattggttgatcaagcagtatatcataccttaaaataacctaattcaaacgagcgattaacaagcaatctctagaaaattctatggtttcatgagtgaataacggttaagttctactatttatataactggagataattatgaaaataaatcaccagcaaccaaactagaagacgacgagataaggatatactaccaagtagcatagctgggaggacaagcaacgccggaagagaaaaagcgtgctgggattcttagacgagctagttccaaggagagcagtagcagtgagggtatgggggtcaagaagtaaagtaagggtctgtatagtgaaaagctcatagataactatcggcttaatcaattatatatattcaagcatcgggtgacaaacttgattgatcacggttgaattcatcctaagattgtaagtattgcatcgccatatgtcaaattagacccggctatcgaagtttgggcacgcacgtggagcttctaaggttcagccatatgggaattccctatagatatagggaactgttgtagtttggcatatgaagtccagcggttcaacaggtaggagacttgggcgatccaagtgtggttgggaattgggatctttgtatccgtggtctagatagttctggttaagaatgatggcctggctcatcgccacttgaattttccgattatcgggcctgccgagatcggtccactggttcaccatcggcatgcctaatttacgggcaccgaaacctctccacgcttgacttcaatatgcatatccgagaactccgtacatggacagccaatcataccattgattctgattggccattctttatccttatcatgtggatatagtgaatatgctacctagtaatctatcgtggaactacatacggaccatagagtcatatgttgtagtagtagcatatcagtctcaaatgcctagacgaaagtgggtgttttgttgtatcagctgtatgtgacatcttgatctgtatttgggcatggcttgcttgatggcctatcaaactaatgatcatgaacccggagtgaatcacaatactccggccggatatgcggccacttctcctaacgacgcaagattttgagaatctgattatctagctcaacgttacaatggacgttatcatatgtaagataacactccgatatctttcaaaaagtctcttgaaatctattttcttcgctgcgtcatacatagctacgaagaagttgaacactagatttcccttgagtctagttacccttataaccattgcaccaactcgactttgttcaaggcgacacagacgaatatcaattccaaagtcattaatttcgagggttaaggataatccggaattgcctccgaatataacaggaaaaacagagaatgcttcacttctcgtctctctgcatttctcaaaagtatctgtacaatgctgtaacccggtatagctacatccctcgtttgtcttgtttctttcgagctcccttgaggaaatctaatcaagcccattgaatatccgagtgccttctttatatatagaaaagtaaccgatgccaaggagagaatggttggaagctggatcgtcagacgtttgttgacgttggggaaatggcccgatgccttggtcttggcagtcggagctttccccgagagctcgcactcgcttccctcttgctactccccacctatttccaactcctctcctctcctcagcaatgggtattttcagcaaattggtcaagaccaccgtcgcgggcagtattgcctcggtcggtgtcttctggggtgccacgcgcaatgacgttttcgaagccatggacagctccgatcccattttccaatcagccttttacaagaagttcaacccaaacaacaaccctacccttcatgatgtctgcgttcgtcgcattcccctagacaagattcaaccctcactggtcgaggagaagggcaagttggtggaagcgttctgtgccggtgtctggggtggcctgggtaagtcctaccctggggaaacgagccttgtcgcgatgtaacatgctttttaacacgttgggtttctctccaggatacattccccagcgagccatccttgaacgaaagtaccgcggccccgagactgccggtcatctctgggaccgatcggaccttctcaaaaacaaatacgaagtaggaaccatcgtcaccgaccactttgaggtcgtcgagaagaccgaggaccgtattgtcgttcgctgtggtgactctccacgtaaccgtgacgtccgtccctccgatggcctcttcgaaatcgccgctaagatcaagccgaatgaaggcgttgctgagttcagtctgaagagctgtttctaccaggggctcggcaaggcggaaggtgcgcctatggatgacaaagtggcttgggcacaccgtcagtatactaagttattgctggaaaccgccgtgttgaagaagtgcatccggtagaagggaaggacctcgcatacgaaagaatcctaaaccttcggttgggccatgtcgtgtatatattcctaatcaggtatccataatcatggtctattagcattcaacttcaactcaatcgggacaagcataaaactttcaatgtttatgtttttctattcttctactttacatctatatttattcgaccacaaagattctgcactttcccctatctaaaggctgacatacaaaaaaatcaagacttcaccacctcggcctcgggctccttcatctctgggaagtccttctcctcgacggcgattgtttctacatcactggtcagagtgatagccaggacggttgggatagcgataaccaatgagcccatgcaaaggccccagtccatagcgaattgggtcatcgcgggtttcttcatggcattgatacgccacgccattgcaccaccaacactctggaaggtcttgtacgctccgaccagaacggccgatgtagcgggggaattggactgagcgcccacgatccagtagcagaatgattgccacagcgcatcataagcaccgtagaagatgtagaggaacatcgggcccactgagatgctaccctgtgtgtaatcgatatcctgcttcaggcccttatccagacgggcagtagaccacaactggaacttataaccaccaccccagatgcccattccagtgacgaacaagaatacccaggcgatgcgagcgcgcatgggtcggttcagacccgggaagtcgagaatgagacccatgacgagaccacccagcatctgcgcaatccaataaagcgcgccgttgagcgaacgcgtccggatattaaagttcataccattcacagcattctgctggtaggagtagaaaacattggcggagaagaagagcggcaggatacacaacacccgccagttgcagatagtcaggatggcatggcgaagaatgtggcggaagttcttttcgctctccggtgtgatctgcaattgggcacctttgacatacgatggcgggcaaatgaatactcccagggcccatccgaaggccatgatggtaagtaaggcgatgtacgttgagtcgctaacagtgccgctcgtcgacttgaaattgatgccgaaactagcgagagatccaacgccaccaccgaggttgaagataatccagaagactgcgattgcgcgacccttgtgtgactcgggcacataggtagtcatgatggcgccctgtgccacccacaagaatgatgcgccaacaccgagaagggcaccggaggcaatcacaaatgcaccattgttggttgctgttggaagtatacgttagctgtgtatacaacggcagtgcggattggaagctgaacatacagttgaaacacagaagactgccggaatacaatgcataagtccatcctccgagcaagagacaaactctgggtcccacacgatcgaagatagggccgacaacgaagagtgcagttccggcagtacaggccaggagagctacagtcgcatttgcagcgacggtctggttaacttgaccggaaccaccaagaccgctgagagcattgtacatctaatagcattgttagttcttggaacttgactaccagtccttgccaaactcactcccgggcagcagaagcagatgaaactgatcaagctgatctggaaccaagaatcggtccagatcttgaacaaggtagagcgattctcattgtgggtgccggcgacacgcccttcttcgactgattggttcgacatcttgtgcgtatgaaacaaaaagtccggggagggaacgacggggatcttatgctaaagacttatagtactagtcccgacattcccctatatcggacaattagcgcttatcgagtctggggccccacgcgatacggcagttaggttgcacgcgatacgctcatggttgcacgcgagaacggcgtatgatatgcgtatcttcagcgtatagtatgtggatatctgctgtgaagtagtagcaaaagtggagcaagactgtggcctttagattgaattgcattatcgggccttatcacacgacttcttctttctcggccgacgaatcctatggtagataaactccactacgccgccacatcggttcatgccgattcctttctgggaaaagtctggagaagttgaggtctccaccccggtcgcttgctaaccggtccaatcctgcgagggcaagatcccgtcgttgtaactctaccttgtaacggctcccattagatcgggccactaactgtctttttggtaccagggacttctcgctttacgtacagagaatctgtcaacttcccatcttggtatagacctcgtggaatggagcggtattaggcacgtggctgacatcgcgctatctccgaaatggatcctgttcgtctccccaatcgtctaaaagccccccttatcgccctttttccgtgtagtttgagctctgactcgtgattcgtgaaaaaaattatattaatattctgacaagcaaaggcgttaagcttgtcatctcccaagcaatcatcccatccttggaagaacacccggcataatggatctcggaagtctatctcaactccaaacggagggggtcaatccccgaaccgtgcatattgaccgcatgtcgacccttgacatgtgcactgtgatcaatgccgacgatcaaaaagtccctgagagtgttgttccttgcttgcccgttatcgcgggagctattgacgcactgacgccgcgagttcgacaaggcggtcgggtgatttatgtcggcgctggcactagcggaaggtgagtcacgtgacagtggtccggtagtcaataaacaaaaagattaaaccgattctaggcttgggatcttggatgcatcggaaatccccccgaccttcgctgcccctcgcggacagttcgtcggcctgattgctggtggagatgccgctatccgagaggcccaggagggagccgaggatgatgagaaagccggtgaggatgagatgaaatccctcaacctgaaccccgagcttgatagtatcattggaattgcaagctcaggccgcacaccttatgtcctgggctgtcttgctttcgctaagcgtctcggttgtgtgaccattgcggttgtttgtacagttccttctgcgatcggcctttccggaaatgtggacttcctcatttcacccgtgtctgggcctgaagtggtcactggtagcacccgtctcaaggccggcactgctactaagctggtgttgaatatgctaagtactggtaccatgattcgcacaggaaagacttatggaaacatggtatgtgatttgcccccgaccgttgtactctggctaaatgttgatattcaagatggttgatctcgtggcctcgaatttgaaactcgagcaaagatcccgcaatattctacggaggttgagtggaaagtgtcagtccttatccgacgctgaattggacgctctccttgcgagatgcaatgccagtgtcaagctggctatcttggttgcggagaccggggagtcagtcgagaattgtcggggatacttcgacgctgccgggggagtcttggccaacgcgctggctgccatctctaagcccatcgaacagaaggccacagttacccctactcaaaagtttgccttgtgcattgatggcggcggtaccaagtgtgctgctgctgtggccgacggtcccaatgtcgtcggccagggctctgctggtccatgaaatctgtatgannnnnnnnnnnnnnnnnnnnnnnnnnnnnnnnnnnnnnnnnnnnnnnnnnnnnnnnnnnnnnnnnnnnnnnnnnnnnnnnnnnnnnnnnnnnnnnnnnnnnnnnnnnnnnnnnnnnnnnnnnnnnnnnnnnnnnnnnnnnnnnnnnnnnnnnnnnnnnnnnnnnnnnnnnnnnnnnnnnnggcggtcccaatgtcgtcggccagggctctgctggtccatgcaatctgtatgatctcttctcgttctgattctatcctatgttcaccctaatgctaactttgtctagaaccgatagcattggaaatatagacggagtcattgccacgttactcgacgccgcaaaggctgctctgcaagacgccctgccaagcgacgtggaacagacagaatcttcttggaaggaatgtctccaaacatccttcagctctgtctggattggactagctggtattgaccgagctgggctcgagggagtactagcacccaagctgagacaagcgttcggaatcactcatgaaaaggacctccggttaaccaacgacgtagatctgttgactgcgggtgttccacaatcattcggtacaccctccgtccttgtggtcattgcaggcacggggagtgttgccatgcggtacaaatggtccgaggatcaacacagatacgcacgttgtgcccgttctggaggctggggccatatgctcggtgatcagggcggtggctacacaatcggtatcaaagccattcaacacaccatgcgcgtcttcgagaatatcaccttggggcttgataaaactggcggtgatgatctttccaaggcggttgcggagaaactgggctgtcaggtgtccgatagtgctagccacgacatgttgaacaacatcttggcccagaactactctcaaggggtaaaggcacgcattgctagcattgcgccggttgttctcgacttgatggacaaaaatgagaccgcagcagatatcgtgagctcccaagtagctttgcttgttggcgaaactctcggtcgcttggtcaagcctgaagctactggctatcagccatccgaggcctccgtgttggtgttggcaggaggattgatgaagaatgagagatacagggccacattcgataagcaactggactcgcagaaattgtctttcaaaggaacggtggttgttgaagatgcagctcgttcaggtgccacctactcgagtcgttgagcctggttgggctgctttttccaaaaaatcaataaatagacttcttctacttcgcttataatcaattttcttctcttttttttctttgctcaaacactctattcgtctttcatctttttgaattgaaataacaatcggctcaaatttcactatcgttctattttaacattggaaccgcttcaatcaccgattccatcgccggactctggttccaaatccccgtgatttccaggccggcactatgcaagagatctctccactgtcgctctgaccgctcgacaccagctcctatactcatcatctgaatatctagggaggcctgcatcagcggcgtatcggtgtctggcaggacgaaatccacaatgagaatccgagaatagtccggcgccattgctgtcaccgtattgcggaggatcttgcgactgatatggtcatcccagtcgtggaagatagagcgaaagtagtacgcacgggcacctttgaccggttgaggatccatgaaattgtatcccatcacctcgattcctgcactctctgcctcgaccccttcgatcacgcttggtaaatcctgcagtaccattctgccaggcagatggccatattcccggcggaacttgcccagatcatgcccctggttgccaccaatgtctactaggaagacggtatctttgtatggcacggcatggccaaacagtcgtccgacggggtatatatcgtaccacatcggtctaccctcgcgacgactagccatgtacgagttgaagagctcctgctgctgggcatgactcgaaagccactcaaactgactctgaccaacggcccattgcataggcgactgagtataatcctggggattggcatagccgtgggagcgcagatactccggaagtttgctcagggttggaaaggtaagatcatatctaaacaagggtcagtgagtaacggcgcgaagagacgcaagccaccaagccacatcacatacatgcatgggattccatctctcccaatcggctgagtaagtgccaccgtcttctcattggcaacatagagctcgggagtcggtgtgacgcacagcccaagagaagccatgacacgcatcagtcggactaattcacggagttagccgaatcacaatgtgtgacgaactaatgatattgcaggaaaaagtaccaattaaatcacgctcagcgcccgtgtattctgccagctgagcggctgaaagccccgttcctctgtgccgcttctccacaagcatggcgaaaattcccaaatcaatgacaacgcgcaatgcagcattttgaggaggctatagtccagtcagaatgagaagtcagttttggtccgtggaacgcctcacctggtagatcagacgcaacacggtctccgtcggcgtttccactgcagacctcagctcgtcgatcactcgtaatagctcaaagtgggcttgtggcgatggctccaaggcttctttcagagccatttggccgagacggctgaccaaacattgaaagggtgtggtgatcgtcattatcgctgttcaatggaaagaaaacaccgatacttagtgtggaattctctgcttcgagtagtacaagctaggatgatggaactatttggctggatctcgattgcatcttatagttcatggcgcaccccttggtgacagtaacatcggacaagtaaatgaattaaagacccttgtttccatcggcgttcaattcattgctacaacagacggatgcaatatgggtaagcttacaccgaaaacagctgaaacccggggcatatcacatctagacgctccactgttcgatcattcttggtccatcgtctgaatacaccgcatttgagagagaagttaacccgatcgagatgacctagggtgtacgatttgaatccggaccatctgcgagtgtctactttctgtactcacattatcctcattggactttactttttttaataaaaaaaagcaaatcactgaacgatcggcacaaaaaaggaatctggcgatgtggctttgtgacttatgctataaagactgtgatagtgatcactagccgctgccaggtcaatccccaaaacatttcagtgatgccttctcttccaaataccattaagtccgaatctgactcgcgatggaagccagctattgcaacagttagtctgggagcagcgcatttacaccccattgtcgccaaactcgatgctgccgcctggaatggtcagcaaggactcgaactctttcatgatgatatagcgcagctcgccaagacccttcgcgcccatgcaactgacagtgccctctgcactgatcgggacttcgagatcgacgcagcacacgctattcgagatctatcttctgagcgtaatctacaagttctagctctccaacctttccgacactacgaaggtctcattgatcaagaacggcatgcggaacgtatcgacgaactcaagcattgggtgcagttatgcaagattcttggcgactcagtcttcatcctgatcccatcatctttcctcgacgcctcggagatcacctccgaccgagaacgtctcgcagcagacctggccgaggccgcagatgtagcattccccgtgcgcatcgcatacgaggccctggcatggggaacatacatcaacacttgggaagactcatgggatgtgatcaaacgggccaatcgacccaatctcggcatctgtcttgacacattcaacatagcagcgcgactgtgggccgaccccaccgccgcaacagggcgacttggtccgagcgcagaccgagatctgcggaactcgatggaccggctggtacgggagattgatccagaccgagtgctgatggttcagcttgccgacggcgagcgggtagcccccgagacgcccttccttcacgcaccaggcctgccaactctgctagcctggtcgaggaatgcgcgtctgtttccgtgtgaagaggaccggggcggataccttccgattcgcgaggtgacggatgcctgcatcaacggtttgggttataccgggtgggtcagtatggaggtcttctcgagatccaccggggaagataacccggccgtgccgatggagcatgctgcccgggctagtcggtcctggtggcaggttctggaatttttgaaagaaaagtcggggaagggatccatctaggtcttgagaggcttgaagatcagcgcattttgtttcagtcagtgttattctacattttttcggttataaatggaactctgagtgcattcaattggcacagaggaatgatagtcttggtggtaaaataggccagtgttttgcaatatccttttatcgtattctcgttcttgatgtcgataaaccagtcatgctcgaggcctacacacatacccttctgcaatccaaatgtgttagatctcaaatgaggaaaccaataatcattccagaactccgaagaactgcatacccaaccaaactatcgggtgcatctccttctaacggaacgctacaggatcattcccgttaactggaatgttatgcccaggtctgtattttgagactgagaaaattcaaaataaggttggaatgatccgcgtagaccgatcgaacgggtcggcattcttgaatggttcccgagaacgtttatcctcctcggatactcctccgtatagagatcagaactccacagcacattccccggcttcccggatgcttctgccggcccgctcccgatccaatttttagagtggagtctgcatactagatgactcccaacgctgtagtgttctctaaggttcctagaaaaaacagctaaatcccgtttgacatggacctcgatgtctagacttaccgctgatctatcttcaagggtggtgcgtcactcttctgtgtcattcccctagccaggggtgaaaggagacgtctcctgcaatatacgctttcaggtgagacatcgctgagcccggccctttattcgttcgctgtctagaatggtcttagtccgatttagcactggtggaagagtaagactgttgtacgttacgataaacctgttcaacaactttgggatatatatgatggccaatgaaaacagagcaaacacttcatcggggcatatccgagcacagcgctttgtgtagcctttacttatgagacccaaattgttccagactgaaggccaacgttcaccgccgagctcggttacactgattggcacactaggtttcagagtcccagcgcagatctagacctaattttatgcgtttaggtatgttgcaactcattatcacattgaagctctatcacacaggttccttttttttccggcgtctagtagaaagccttttggggctatcccaacggcattttaatcccaactgaggcggatgtgtcccgggcagctctgcggtgtaacaattgccgctggttgcgattgaaattccactccgaatatggagggaaatgcagaatgtatgcacttggttaaagctagacaaaggaataattcccaaaagttggaatctggccactagcaaggtagctagtcagtagcctgagccacagtagatgtagtagaccaatctcgacgttaacggaacgccactgttggatcctcggcgaatgaaatctctggttccaagctgagcgtttgctagtgacacaaacgagtccctcggcgatccagtcctcgtgcattgaaattgtgctgctgtacatggagtgtatgcatatgactatccctgagatattattccctcaaatccgaactattcaatatgcgccttgatgacttttgttggaatctgcatagtcatcacagcatagtatcgggtcctttgtttgctactaggccgatccctgtgatgtgtatatccttctcccgatgcagaaggacttcttttcccggacatcccgaatgcagtcagtataggctcatttggaaacatggatcattgaagcggtctataggagcacccgtcccttaaatacgggttggccctcaatattgcactcgaataccaagctgctgtgatacccttcctctcattctagaatcattctgtactcataatgggtatccaacgtgggagtccggcagcacaggctggcccctccggcactatcaacccgttggtgcaagagtttggatcgcttcaagttctcgacgacttgattcgcttgcgagctgctgattctgttcaatctcccattcttgcctatccccgtttcgacaacgatgcagcttcctatgaatactacactgggaaacacttggatgctatgataaaccaagctgtcatcatgctcatcgatgatggattcaaacaggttggtaataacttgcgctgcgtgatgtcatctctaacaaattaatcgctaggcaacgcggagtccatccatcgtggcacttcttacattgtccgacttgaacatggtgatcacctttttcgccctaagtcgactgggttatactgtcatgatgctctcaccgagactttcgggcgaagcctgcgtgtcattgctagaaacggtcaattgcgagtcaatcatatatggccaatcccccaatatccgctcaacattgggcgagatcctttgccggaggctagtgagctgccgcccaatgctctcatgctcttcatacaacaaattacaatcgtcatcgcatgttctgcgtctgcgtcgcaatcgaaatcctgaaaaggtcgccttgatccttcattcatcgggatcaacaggcaccccaaagccgctcttcctcacacacaaagcaatcatgactcatcctctgcgaggtcctggttttacttctttcaataccctgccatggtatcacctccatggcctatccactgcattgcaggcaatgtggatgagaaagacagcctatatgtggaacgctgcgctgcctttgactgcagaactcgtggccagggccctcgaagaggccagaccggagtctgtagcagcggttccatatatgctccaaattttgattgatgatccccgtggtataacagcgctaaggcaatgcaagttggttacgtacggaggtgcaccctgtccggacgagctgggggatcgcctagtaagcgaaggagtacactttggaggttcattcggcctgtaagtactattctgcgagtatctacagccatgcaaagactaacaatctgcagcaccgaagctggccttgtggcagaatcaatctcacgaccgaaaggtgacccttattggaactatctgaaattcttcgacaatatccgatcatatgtctggatgaagcccatctccgaatcagatctgctcttcgagtgcgtttatcttgctggtcatccagcgttgacaacctcgaattcaaacgagccgccaggatccttccattcgaaagacgtcttcacccctcatcctacaattgccggaaggtggaagtacatctcacgattggatgatcgaatcaatctagtgaatggcgagaaggttttaccactcccgattgaaggccacatcaaacaacaccctttcatccatgatgcagttgtcgtcggggtaggaaaagctgctccgggactattgatttttcgagcggacgaacctgaagccaatcgtctctcagacgaagaatacctcagtgcaatctggccgacaatccaagaagccaactcccaggcagaggccttctcccaaatctcccgcaatctggttgctatattgccacatggcgccaagttttctcgaacagacaaagggtccatgatccgagcacaggtctatcaggaatacagcgaacttatcgaaggcctctataccgaagggaaacagatgtacgggaatcttcagcttgacgttgtggagacagggcgcatcctggttcaactagccgagcacgaacttgggatagccctctctggtgtcgacgccaatttcttctctgaaggcgttgacagtctcaaggcaatccacttccgacgtctcattcttcagcatttcaagtttgaggtaagccagcctcctggtccgaacgtcatatttgaaacgggctgtatatcacagttggctcggcatatctgtgctttacaaaacggcgagatattcgaacaggtcgggagtgatgtctcggcgatgactgaattgatcgagaaatattctgtgtttgagaggcacattcccgaactacatgatttttcaggtccgaacagtgtagtgagtgtttatcctatcttgctgtcgcgaatcaggttcagaagctaacatagccaagcttttaacaggagccaccgggtcgattggagcccacgtgttgtacgagctgcttaatgacgactccatctcgacggtgtactgtctcacacggcgagaatcgccactggaagcaatactctgcactctaaccgacaaagatcttctcatatccccagaacagagaatgaagatcgtcgccttcgatagccgcattgaccaacccgatttcggtttatctctggacgaaagtacaatcaaccacatgctggattcagtctcgctcattatccacacagcatggcccgtcaacttcaatctcccactgaccgagttcgagccgcacatccagggactatacaatctgatccaattctccctgtcggtgcagagacgcgagcctgccgtcatgatgttctgctcgtcagtctccaccgcgctcggttcccgagcagccgaaatccccgaagaaccagtcgatttggattgcgcctttatgggttacgggcagtccaaattggttggggagcggattgtgagtaacgcgcggcggagtggggcgagggcttattcactccggattggccaggtctcaggccactcgaagaaaggcctgtggaatgactccgaagccctgccgctgatgatccggtcggcgctgacactgggcgcattgcctgagctatctcagccatgttcttggctgccggtggataagcttgcgtccagtattcttgaactcgctaggacttgtgctacgccgagtgagtttggggaaagtcatgcgtccagctcggctttggagtacgttgatgactcgattttcaatctgtgtaattctcgcgaattcacctggtcatctttgcttcatacgctgaaggattctgggttccggtttgatgtcgtgccttttgaagagtggttgctgagacttcgtcggagtgagacaaaaggtgaggaacttgtcaatccggcggtcaagctcattcatcattacgagacgatgcatgggaagaattctttcatacagaacagtctcaagaggtttattacggacaaagcagagaggagtagtgtgactttgcggaatggccgactgagaattattgatgatggaattctgagatgctatgctcaagattggttggcgaggtggacagtctagggagtgaaatgtttaaatttgggctaaagggtgtctgtatatattgttggatcactaatagttcgaggaatcaattcttcattaactacttatgcttccttttgtgtgcaatgtgcaagaaaaggcaagacgacggcctcggaggcaaaacacagactgaatacagactgaatcgaaacaaaaccaagcaggatacggccatctatagggcctgctgtactgtacaataaaaaagatgaaatctgccaaatttggaccagtttcaaacgcgatctagaacaaatatttaagccaaaaacgcaacaattagtccgacaaagagagctgggatgctcatggacaactgatagccagcaccggtgaagaccgggctagctccagactcagacccggtgggaacatagtagccagttgtagcggatgtagtcgtctccggagaagcagcggtagtggcagagctctgtgctttggaggctttggaggcctcatatggaacgctagaaacaatggcagaaggaaccaaagaaggaaccgcagaagaaatagtagaagacgcccatgatccaccgaaggtctcggtggggagggttgcaacggacgtagcagcgacaggaacagctgcaggcttcgagttggtgtggctctgagcagttgggacgtatgcgacactggagggagggaccacggcagctgcagaggtccgtgcctccgtagcttgggcggtggctgggatttggacggattgcacagccggagcggagacagttgtcgcaacagaggactgtgcggcaatagatgaggactcctcagcctcggggcagaaggtcgcagttgcagtgactatagaggtgatagtccgggtcttcttgctggcgatgctggtcgtagtgctggtgctagtagtgctggtggaaggttgcgcgactgcttcggtggcaatgctttcggtagtagctgcgacagtaggaaccgaagtagaagtcagttcctgaactgcgccagcggtttgagtttccttggaagcaactgagtgcacagtggtggcactgtgagtagtgtgggtctcagtagttgtctgcgagactacagaagtagcggcagtggtagccgacgcggactcggatgacgaaatcgaggcaactccagtctgatagatcttgaccgagttaatctcccagtacgtctccttgaacttggccgggttgttggcgacgtagttgtggcagctctggaaggaatcgctatcggtcacggggcagccggaactaccaaacacaccacctgcccagtctccgcagaaggtgacatcaaatacaaacgactgggccttgaaggagttggcaacgtcgcacgactcctgtaccacggccataggagtgccaaattccgttacatcggggttgccgctagtaattgaggccgggatcgagctgcgagggaagtaccaaatcttgaggaaatcgtcggtccactgcagtgagtagacaccaccgttttgtttgttgaaagatgtgccatagctgccctcctgaccctcgaccttacaaccgatggttcctatatcctcaccacaccctgtagcattgaccgaaccggtcatatccgtatctgtcaaactgcaagtgccggctgtgtgcatgacgatttcgttgtaatcctgcaagttgacaccttcgatgatatcaatctcaccgtctgcaggccagttctttccgacagaccaaaaggcaggccaggtaccgcagacgctaccaggcatgtgggcgatatcggcgataaccagcgactggtcgtagtatttcttgctgccaatacgtactgagtcacggcccgtgttgccgttggggttcagcttggtagcatgatcgacaccgagatatacactgccggtatcggtgaccttgacgagccctgaactttcggcggtctccttgtcgaggtagttgacgaagccattggtcgggtctgaaccaacgtgaaaattgaaatagtccaggaaattgttcccctgccaagtctccaccagggagtaactcgtggcggccacgggggaagataacaaagcgagcatcagcgatccagcgctcaatgaaagggttgaagaaaccatgttggaggcgtataacaagaccagatgcttgagataatccagaaagcaacgagaataaaatgagcgagagtgagtttgataaaaagagagactaaaagaaagaccgacaattccagattgtcaaagattgtcaaggagaaaagaatgtgagcgtgtccaacgtacaacgcagcaaaagtgggaagtatttggcccaaatacctttcaccagccgcacacgcccatattgctttatgctaaaaaactggagatcaatcttgtctatccagtgacaatgcgccagtgcctgagaccttctgtaataggctgcaactccggagtcaacaaaccccgtggcgctctagtccaggaggccagtccactcatgatgatccattcttcagactaataggccgaacaacataaaggggatcgactggtcgctgtcacagcggttaggagtcactttttctcaatctgaaaccactagagtccaccaaggggcgacccaaaacaagcggtgaaacaggagaatctttgcatttgaagaggagaataaaaagagtcgacaaagaaaagtatctagagagtaattcacatcgcgatctcccctcattccttcatcggcacattccacgtcagaatcaggatcaaaatgtgcgatgttatgatcggagttgccggctctccaccttgcctctttcgatctacatatccacttggctgccgttgggcgcttatgtgtaggttctcttgtaagtctagactgtcctttgtttgtctttgttcagctaatcagaatatatccttgtcctggtgctaatttcaataagccacataatattaaacattgaagagacgtcacattcccgaacccgaggaatgtcggcaacaaagcaaatcggggaattatctaccatcgtctatgctggggtatatattctaggaatagacggtgatgatcgtggcaatcccccaactcctacaatgttataccccgtattggtggatagcaaattatagattaggtatcttttgtgtggcaatcctatacaaaaggtacagaaacacagcatagtttaattgttccaaccccacgataatgcagtcatgtgttatattaaaaagccttatttcagtgcagattaaatctttcttctcgcagccgagtctagatccctaatcaggccgccatggttgaccgatatatatatgtgacgggtgatgtgctggcatttctcatccaccaatgttggccctttcttgaaggtggaatgcttatcgcgattgacaggttgctgtccgactcttccaagatttgttcaaatcgtattctttgagttcttgactgttttcgtggttttacatcgtcgtatactcggattccccggacccgctatatatatcaaggtcctttatggagtgatgaacatgcccttatcgtcttcaagacttttccatgggagcaaattcctataatctcgagatagggttgcagatattattggtggtcggaactatgcgctcggggcatttccgatacttttagtacctattgcccagctgtgatgacgatgtgacgttgttaacccgggcttttctgccgctatggcctccgatattttaatgatcttatcagaatcctgattttatctttgtaggttcagatacctaagtccatgatgtcaagcttgggggaagccaaagatgtcaatttatctatcgaagaagaagtgaacgcgagacgaggctattcagcgtaagcttggatgttctgattttatatagcgattattaatactttccagtgctcttaataatcctaaagtatccagaaagtccaaggataatgcattagacctactcaatgatgagcttgacggggacacacctcgacattaccgtgatgaggttccggaccagagtacagactcgagtggtctagttggcgtggaaaagtaagtgatactcatgtacaataccaagtcgattactgacaatatttttccagagctgcacctgagtatcacgataatagtgaaagcgaggatgactaggtggagagacatcatccaggatagaaattgaattacgttcacgcattagcatattctgcaggctataaacaagcttcttcgtagggcaagtgaggcaaaagaaatgaaatatctatgttctataactcttgttcttttcttctactccattggcgcggtcagagtgctttcttcatccggccaccttcggaatagatcctggagatgatccaggggagctgtgagcaggtcgactgcagtctcatagcgtgggttgtccagatcatgtggatgcgagcgagagggcacaaaaatcttagtgcggctcagagattcagccaacttctcgctctcgtcggaagtgagggactcctctaatatggccagatcattggcctcttcgtctttcatatgctgggcaagaccttccatcaacaatgtaattgtagggaagaagcgcggatcggaggagtttagatcctggaaaacgttgagcatttctttgagctatgtcatatcagcatcgctctccatgaaggatatcaacacttaccgctttatgctcacgccgatcatcatctagctgctccttgccagctcgaagcttttccagtgcagggaacactaccagctcctcggcgacggcgtgtcgtgcaagctcccaggtgaactggttctgatatcgggtttgttcatcttgatcttcagagttgacaatgatattgtaataagattcgagtttccggtgatcatctttgatcacgtcgcttatccgaaccatgttggctgatatagtgaataaccttgagttcatcttaacgttgcctttttgttagccgcattttttctggttcactgaagttatcatgacgtttcgagggttctatatagtaatcccagcgtcccgtggaacgtgattccgaactgtacaactccgaacatttactctggttgagataacgtgatcggataaatatgtcttaaagaaatccctaaggacatgctagcttccctcgaccccatgacttggatctgcagctgcctgatatgacgtccgaagtgcggtgattgcttatttgctgctgcaggaggcccgagtgcctgaacggggcatatgctttgccttggatacatctctcgtattccagtttttctttctacctcacctccactttggcatgagcaaaattcgcaatgaacgttttagtaaaaggagaacatgaacaccggttagagctctcatggttattcaaaggttggatgaaggctgacagtactacagagaacagatccctcgtgatatgcctacatacgagcagatggagagtggactttgcggtcgcgtctcccagtggctatggtctggatggcggggtacggcattcgaaggtgcttccccagatttgcaaaagccataccagctgaatcatggggactgtaaggcctgtcgtgaacaacatactacctgtgatcatacacgacctcagtgctctcattgttggtcacagcagctcttgtgcttctatgtggacccgaaacggaggaaacagaaaaatattcggaaggcaactttcagtgaagtggaaacgagttccgggttgatcaaggacacgacagcgtgactgtatcttttgttctcttgctcttattctcctttccgagtatttatatggatgataggtggttgtaggcctaacgtttcgaggctatcaaagtcctatatgtacttacaagtatttttgcatttctaccatttatttttcttttgagatacacattctaaggcccaagttatattccagtctcatttcaacagaattaaacgaggttcttttgaatctcatagagtgcaagctgggtgtaacgttggaaaatgcaagatttggcatcaaagtcgtctaaatgaaccaccacctccaatctcccccacctttttatgagttaccccacaataaaacttgcgacgaacgccgagtcggcacaacagcgcaacacccagagctgtgttcggaacactgtgacccgatacccgctccaccaacttccacataacttgggcctgcacttttcttagacccttcgaggaatacccggatagctgctgaattgctctttgctttttatgcagtatgagtcgttgattgtcaccagccgtggttgaggcagtttgcgtcactatacgttatatccatgtgtgattgattcgaggtgaaatcctatatagaccctcaaggtggccaatctaacctcagcacacagatggaatcggagtaccggcgactagcggatgctatccggaaccaggccaacgctcatcccaaatcacgctacctagttgccatcgccggcatccccggttcagggaagacaaccacagccgaggcagtagtgcaacagttgaatcagagttcgacttcgcgtgctgtcctactctctatggatggctttcacctttctcgggcagctttggatcagctgccgaaccccaaagaggcacatatccgtcgtggagctccatggacgttcgacgtgagccgctttgtagcctttatctctcgcctgcgaacttgggccgacgagaaaccgctagcagctccatattctggaacctggtcgtcagcggatgtcattcgcgcaccgacattcgatcacgaagcgaaagaccctgtggagaatgggatttctatcacgccggatgtagatatcattatcatcgagggaaactatctacttctcgatgatcccggctggcgggagcttgctgagcttgtcgactatcgcgtcttcgtcgactctgatccgctagaagcaaggtgccgattggctgagcgacacctacgggcaggtattgagaagacgctggaggatggatatcgccgggtggatagcaatgacttcttgaatgcgatctccattcgagagaaattgctggccccggacattgttctgaaaagcgtgacagtggatggtatatgatatatatcattgatactacatattggacaaactgagcaacattcattcatttgtaactcattactcctttatcatctgcttgtggaatacatctaggtatatttgtcagatataagaaaaagccaggatattagcatattaaactcactcggaatctccggcatccagctcgcccgaaccttgcagaagaattccccctttgggggtaatgcttctgggtcgtccaaggatccgacacagatgtagcgaaaataggttttggcagcatcctgattccatttgttagaagacatccgtacccattgtataatgctgacataccccatattccaggatgaagctaccgcaattttgacaaaattctcgatgaataagagctccagatccgttatctgcgacatgctcctttggtacccctttagtaagattgaatgtatcctttgggactttagctgtcaggccatagttagtcccaaaagctttctgttcaatgattttagcttcggtaaaatgatatccccgttcaattcaaagtgtataccttgcagttacggcaatggcagagagatgttctcgcatcatcaatcgaattgagcttcagctcatactcgatatcccggcaaatacaagatcctgtgagagtaggcatgttgaagctttggatcactccgatattcgtgtgatatttcacgatgacgtcactagctttggaggtcacaccatctgatttctggcatgatgatggtgatgagcttagaaaacttaaaacgggagagaagacatctagaacagcccatcaaaaatttgacaaagctgtttatcctagtgagctgtcaaaataataatagaattgtctactaaagtgatgatgtgatgatgacggcgttgatatccggggcgaagctttgagcttatctttatcaacctttcttccgcagatctaataccttaaaaaacttatatctcaaacatctgatacttcaacgtcctacacccgaacagcaagatgaagtccttgaagccaagatcagtggtatcctctttcatctgctcaaatgcaggagaacccaaaattgccatttttcggcgaagtgataaagtcagcacatatcagtatgtatcctcaagtcccactttactataaattactgtagtccagatgaactgatttctctaggcaccacctcgctcccatctcgggcagtatagaaagtcccgaaagtccactagcagcagcatggcgggagctgagagaggagactactctcacctcacgagatatggagctttggcgacagggaaaggcattcacattcagtgatccctctgtcggtcgacaatggaccattttcccgttcctataccgactcaaagactgcagtgaaggtggccgcggcgaggcgggtcttcaaattgactgggagcatgaaggctggcagtggtatagtcccgacgcaatccaagacgatgacaagtttggtggcgtaccacatctgaaagaaagctttcgacgagtctggttcgaagttgacatgaatgatggcgctagcaaggcactgataactggcctgaaacagctaaaggcagatcatcagagcggatcgcacgagctgacctcgattgcgctgcgggcctaccgagatgttattgcgcagatgcacgaggatattgacacgcagtggtgggagaatgctcgcatggctgcatggcatctgtggaaaaatggacgagaaagcatgggggcagccaccttgaatgcatttctcggattgctggccgacatggaagttatcatacatgagaatctcgactccacggtcaaacgggaacgcttgttggctttgatcgaccagcatttggacaagcgcaaggagatgcccatgcgcatcaagcactcctttgcgacctatcttgaatccaagttcttgtctacaacacgctccaggcctacgccctctctcgttattctcaccctctcgtcgagctctaccatccgggacagcatcatagaagccttcgcgtctcttccaattcctaatctggatcttcgcatactggaatctcgtccgctttgcgagggtgtcaatatggcatcttccatcctctctgccttcaaaacaagatttccctcatcttccgatcggcatctcaaattaactgtgtacaccgatgcatccgccgctcttgccagcaaggacgtagatttcatcctgctaggggcagatcggatctcggattcaggctcagtgagcaataaaactggatctttgccagctgttctgagtgccaagcatgtctgtcctgccgccaaagtcttggttctcagtgagctggagaaagtggccgagcctgacgccgagagcaatcggagccaggaagagaatgatccaaaagagctggtgggctgctgggtggaatatggcatcaaaggacttaatgctattgctgagggaattgatgctgatcgagataacacaaactacacagttgaagttaagaatatttacttcgaatgggttccggctgaactcatagaagcgtatatctgtgaagaggggactttggacgccactgctattcaagagaaggctcaacaagtaaagcaaaaggcggacagatactttggtcaactttgagtggaaattgattccagtttacttctgcctttccaacattatgtagtcgtgctattccgaatgacgtcacagtttgttgctgcacgaaataaaagttggtttcgattgcatattcgacctaccatagctagatactacatctgactctttccaaatgtcggaagtactcgacccaggaatccacacctttagtgttccggcaaaagagttgatatttgaatatgtggtccgtcgtccattcaccgaaaaggaagatccacgtaatatcattgttgttcaatgccctggctggggcttaggatctcaatatcttcaaaatggattgcaagggttgtggaccccagaaggccataccagtcctgcagttactagtggctatactgtcatcttcttccattctcgtggaacggatggatcatcccaaccactagcatcccaaatgagcagtatgcccgatcttgcgtccgatttggaggacttgcggcagcacctgcatctcgagcaatatccggttttactgggccactccaacggcggggcaattgcgctagggtatgcggagatgtatcccagtcgtgtcagcaagctcgttctcctcgatcatcagctagtaggatttcgggataagagattgttgcagctcgaagcgacgcgcatagatcctcgataccaggttgcttgggacagtgtgccggatcggcataccgaatctgacgaggaatttacagcgtcggtgagaggcatgtggcccttgtgcttctttgatccgaagcagtatgtaccagagctactgcgtgatattggcgatcggaagctgtcgggttggtgccaccaagcccagggtcgatgtgataagaaattgctgcatccaatgcaaatggtggagagactgagggatgtacaggcagaaacactcatcatattcggccgcgatgatatgatctgtggaatagggataggggaacggacagcaaaggatattccaagcgcccgactgattacctacagtgaatgtggccatttcccctggattgagaaaagggaacagaccatattggatatccgtaaattcattgcaagcaagaccagcatatctctcagaatgtaaaccaaacagataaaatgttgcgagcctgctaatgtgcattgattaaaccaaatgtatcattgtccatacagtaaatcacacgctaaggcggaactgaatatctccaagggctttggtaaaggagaaaaaacatcaaaaacccgaccaagaccatagggtagaggacaggatcgtcaaagacccctaccccatagaaaaaaccaacaaaatatattcacggaaggaaaaaaggtatcatcataatcaggtgtcacgaacacgcgcctgtcgctttgcggtgccaatgtgggtgttgtgcactttcgtggcgaacttcaagctggtcaaggtctccgacatatgagcctggagagggctgaccataacgaacatgagggttttggagtttccacccaaggagaactggagcaagtaggtgagctggaggataagttagtatctggcgaagaaataaatgttgaaaaaaacataccttgctgttccggtatgggatgtgacctccctctttgccttggccgagagctgaaatcacatcgcccagagagctgagactacggttgatgttttgagtctctttcagacgctcgcccgtcgccccactgtgactcagacgttcacttcctgccaagtcaaccaggtttagggtgccttcgctacgttcgccggtgatgtggttctggccggtaagcttgagaatgaagacagagtgggaccgcgatgagcgctcgttggccttggtcgctgctaccgagcggttggcatccgcattcttaagaatagactcgaccatctcgggggagtccaaattgactgttgtaatgtcggtgatagtagttttgccccgctgcatgtcatggcgaatctcgtgcttcttcttgtccaattcatctgggttgcccaacagatcattgaggttttcgttgtagacttcgacaaagttgcctgccattgagtaccgccaacccttctcttccagaccttgcgcggtctcgtaaatctggtgaacagcacgagggatcatgccgtcggccgatgacattgtgtgtgtcttgccactaccagtttggccataacagaaaatgcaaacattgtagccatccagggcgctctgaacaagctggctaatctcatcaaagacctcggcgttctgtgtagatggattgaatacacgatcaaacgagaaagtgttgttcttcctggtaactgttccaaggctggtcctctcttcgggaccaagaatattaatctcctttccatcatcagtttcatctggatactgcataagagtgagatcggaagtaggttcactcttaagcgaggggcgaactcggcagaacacgcggatgttgcctttgagctcttgcacctggttatgaagtttgcgtcgaagtgtctcttccctgcgcagcttctcttttatcgcctctgtctcggcaaatgcatccatcatctcccgattgcaccgctcaaaggatttagactgctcctcccgtccactttcaaggaactcgatgcgtgccttgagagcacgtattgatgactctagcgtaacactgttgctacttgtggtatccaagttgagtttgagttcttgcaccatccttcgttcgcggtcgacctctgccttcagggcatgtagcccatccttcaatgttgtgatttcgcggtccttcctttctagctcaatttgcgacttctgaatgtcaagcgcagattgggaagtcagcttgccgagcgcgcttactcgtgctgctttctcgtcttcaatctcacggtcaaaccgtcgtttcagatcgcgaacctcctcttgatgtcggtcagtgattgtggcgacttctcttctgctttgttgctggagtgaatccaattcaatacgctggcgctggtaaagatcatccatagcgatttcatgctctcgcttgtcctctttacgcgcctgttctgccgtacttagatgatttcgcagcgaatctaactccacccgctgggtaatattgagttctttcaattcatcccgagaggcttcgagctcgttgactagatgaaaggattagattcgtctcaacatagcccttatcagactcaacttacttctggacttgtagatctcaagtgtctccttgagaccggagcttgcttgaccttgttgatttacctgggccataaaagtctgcatcaatccctccatactcttttcgcgagaagcttgatcccattccgggcctgtgatattgtcaaaacttctgatcgaagaacctttggtcaaaaatgcggggtgggagggcttcttgacaatgcgccgctgggaatatgatggtgttctagggggtgcagtgggagcggtaaaataagaagaagaggacgagaatgaatgcgcatatccgggtgactttggggtggtaacagtggagacattccgaaatggggtactgggcaacacggggatagttgctagattggaaggctttggcaaagagacagggttctcagacactgggagcgctgccaattcactaattccattccaaccttcatccaatccgggggaaacggttccaacggggcaagaagggatacggctgggagatgagagaaattgtagcataccctttcgttttcctagcacactgggagagacgtcttccatatgggtatccaaggcgctcgctgcgcgggggatcgatgcgccgacgggtctgcggccgataaaggacgattgatgccgggacatggccgatgctgggcgcgtgccagggccgacggttgaggaaaaggagccgttggctgtgcgggatgcaggtgcaatcggccgggacatcgttgaagacgagtacgagtttcctcggctatgcgccctggtcgtggtgctaggctgtcgagtgacggatccaggtctcttgatttccgggtttccggttttcggacgggttgcttccggtgctgtcagttcatgttgctccaacgagtcaggggcttccatacgcgacgtgctgatagccttgtttgcgattgtacctggcgccatgatgccagagcgcgagttggttgtcgcagagctggcttcacgtaggccggcctgtggtagccgtgtccgagtagacgacctggttctggtctgaagatggtcagttatatccgcaggcactctgatgaaactgaaacccacagtggggtacttactatgttttcaccgtccatcttgggatttgttgaccgccaggttaccggcgaaaagagtatccgggcgagtaggaggagctcacgtcgagccactgtctgtgttggccgcttggacttaaagtcagcggaagttaggatgaagccagcagttatgttacataccaataaatggtctgggcagtaacctttggaagtatgagtatcaaatgagcgcaaaccggtttctagagggacgaaatgcgaagtaaacaaagatttgctgactcagacatgtgtatgacgctagtccatatccggtaatagcatcagctatcccgtattcgtattaccaaggaagtatttgaaatcaacacgtgatcaacccggaaaccaaagatcaaaggcttcaatgtccaaaatgaaacaagcacagacaaaagaatagattatccgaggctagagacgaccaatcctgttctttgttgactcctttttgaggttgttccgaaattagtagttgattcgtggggcgtctttacctccactcgaattcccgaaacagcggccccagtagccccgttgcttgagcttctccaacatctccttcaccaactccttttccttgctctacttcttttttgtttgctctacgtcttcgtttgaacacttggtaatcatgtctgggcgttttgttcgttcctccaaatatcgtgagttacctctataatccaacatgcgcctccccgctgaccgttacaggccacgtcttcgggcgatcgacgagaaaggtaaaggctacctcctataccaccggatctcctattctgactttcgcaggatcaatgctacgataatcttcgagtctcccgaaacgcctgggataccaacctcctcaaggtgtgtgttttgccttccgcatcacccctgacgtttcactggcgaacccggtcttacggcgcatctaggtcaacccgaaacacattgcggtcaattgggaagcaggcggtggcggagcttttgcgattattcctcttgaggaacggggcaagctcccggagcgcatcccattgtgtcgaggccacactgccgtcgttttggacactgactggtaaggaattcggatatagaacccccgcgtcgcagctcactgaaaccctgcaggaaccctttcaatgacgacctgattgcctcgggatccgatgacggcaaggtatagtgcgaataaacaacagctatcagcgttgcgactaactaattccaggttttcctctggcgggttccggagaacttcaccgttcggcctgaggttgaggccgatgacatccaggatctcgcgcctattggcaaattgagtggccatcctaagtacgaatccttgactaaacccgttatggccccatgcttacccctccccgcaggaagattggccacgtgctcttcaaccccgcggcagaaaatgtgctggccacggcctcgggtgactacaccgtgaagatatgggatattgaagctggcgccgcgaagctcacgctcaacattggcgatattgtgcagtcgcagtcgtggagtgccaacggctctttgttggtcactacctcgcgtgacaagaagctccgcatctgggatgtacgacaggaacgaccggctcacgagaccaatggccacaccggtgctaagaacagccgagttgtgtggctgggagagcgtgatcgcattgcgactaccggtttctccaagatgagcgaccgtcaactggcgctctgggatatccgtgccatccgggaacccatcaatggcttcaagaccttggattccatttctggcgtgtgcatgcctttctgggatgatggaactaacatgctattcttggctggacgagggtgagtgcccatgatttaatccttaagccttcgcaatttctgacaacaagcagtgacggcaatattcgatactttgagctcgagaacgacaagttcgagttcctctctgagcacaagtctgctgacccccagcgaggagttgctttcatgcccaagcgtggcgtgaacatgcatgagaacgaagtcgctcgcgcctacaagaccgtcaacgatcaatacatcgaacctgtctcattcattgtccctcgccggtccgagaacttccaggacgatatctacccgcctgcggccggtgtgtcccccgccatgtcttcgtccgaatggctgggcggcaaggaggcactgcctcccaagatctccatggccagcctattcgatggcgagggcatcaaggaggtatcaggagtgcaagaaaagccgaccggctcgctggatgcccccgcccctaagcctgccgaggcacccaaagccgctgagactcccaagactgctgagcctacgcccaagcctacttcttcgacggcagttcctaagcccgtctctgaacctacccccgccgcgcgccccgccccttcgatgaaggaacagggtgcttcaatggctgccatggtgaacaagttcgccgatggtgaagaagagactactgtctcagacgatgacaactcgagcttcgaggaagttgccaagccggtggagcgtcccactcgccctgccgctgccgagtctgcttcgccccgcgtgagcagcccgttgaggccgaaggaggttgagacaaagcaagttgaggcaaagcaagtcgagacaaagcaggctgagacaaactctcaacccaccctagttgtaagttccccgctccccatctatatttgtcaaattgtgccagctgctaacttttctagtcctctattgtcccatcacccgctagcgagactccttcgcccaccacttccgtccccaagaacgacatcgagctgatcaaagacctgatcgccgaacagacaaagacgattgcatctcaggcactgcaaatgcaaacactgaccgccgagattgaggcattgaagagcaagctgaactgaataatgtcgtcctaattttggtctctggagactactaggttggtcaaatatcatttaggtacattcgttgttgggagattacgctccgtattggaatcatgcggtgttcaacgtatatgaggcggtgcagtgtgtggataggtttttttttttgtttcttttagcggaattgtcaatacatttgcccattaaaatcaaaattcggatatgatgttcagtgaaaagccagctagcccgctagaacactcctctacggcagtagattggctttatggctcggagttaacacatgtacggagtaactaactgtaagctaatgatatattaatgggctggcaatatgctactagatgatttgaaggtgttgctcctaaatctcatgtgattctattgagagtaacaccatgatatatactagtgatagaccatgttagcgaagataattgtattttcctcttttactttgaatgatcgcagcaaagtagagattagagtaaagaattcatttccctcactcggagttccattggctctatccctaagaagccatttcaaatagcctacgcaagtcccatatctactgttgagcaagttcacatactagctcaagggaaaaaacaacatacaagaaggtaaaaaagcaaccttgagcccttgacgccatgccccatgattttgtactgaagggaaaaaaaaatcgaactccaagctcagagttcatcttcgtacttgtagttgatgcggcggcccgccaccacacggtcctgccggctatcacggcggcggccagacgacttggccttgtcacggtgctgctgctcacgctcgagacgctccttgttgcgcgcttcacgctcaagggtgtaagggtctttattgatctcggccctcttggttgaggttccgttcgtgtcgcgactacggtcctcatcggcacgtttcacacgacgggctgggggatggtcgccgccgatggcagacggggaccgatcacggcgagagcgcttgcgatcacggtcacgatcacgctcccttggtcgatctcggtcgcgctctgaagttctgtctttatcgcggtcgccatcacggcgtcgttcgcgatcggaatcgcggtctctgccacgtcggtcgcggtctcgctcacgatctcggcgtcggagatctctgtcctgttctcgtgatctgtcgtcttcgcgtcggcttcctctgtccttggaggagcggtaggtgctgctgattcggcttgctagatcgcgcgaccctggggcttcggaggatgctttgatcctgccgtttgatccatctttctctgcgaccttttctaggcgatcagagggacgggaatcgccctttcgactggagctgcggctacggctgcgatgacgacgggagcgttgcgaccggtgcttgtctcttctatctcgctcccgatcactgtcgtgatgtcggcgccgcgaggatggacgagaggatgtgcgggatggagagcgagagtgccgggcgacggattgtagctcatcaacccgatctaggcgtttggtctctgccccacgccgactgtcacgatcgtcttcagtaccacgaacagatggtgaacgggggcgagaagttggattttgcgagggagattgagatcgagaatgcgcacgttgggacagagcgatggatgtagcctttgtgcgattatcctcagagggttcactactggtcgttagcatttataagacaaaaggaaagatagaagaggaaagtctcaccaggagatactgcctcgaccctgaatctggaagccacgttgtcgcagaacgctggtgttgggtagcccctgccgcatggcacgcggagcagctggagcgccttcgacgcccggccccggttcttgtccatatcggccatacctgtattgaccatactcattactcatgtgaccgtatccagggccagttggtacagaattatcaaggctgtcaatggtgggaattccttggggttggtctgtggggatatcttctggattacccggcacatcgggtccagtttcacctgattctgcagtctcatctgtttggacattaccttcagcatccattggagtaccgttgaggccattagccatgcttgggttctggttgacatagcctgagttagcctgacggtaatgaccttgcatgggtccaaagccacctcgaccggggccatgaaactggccacggccgcgacctcggtatccaccgcgaccgtaaccgccatagtaaccggactggtagtctgagtgagaagggtaagcagacatattagacccgccaaatgcacctccataaggaggacccgtgccatttgcgaaagcatttggattgaatttattttggccgccttgccacatattgttgttctgttgggatgcgtcccatcctaaggatccatacatgcccccgttgtagttcatcccagtgttcatgcccatgccagtcatgttcattccgtacatcccctgacttgccatcgggtccatccccatcggcatacctgtggagagattagcgaggttgaaacggcaaatctgggtaatattaaacttacccatcgtattcgggtaattgaacatgccagccatgaaaggattcatgccgtttccgttccagcccatcacggggaagtttccagccacgtttgagataccggattccccaggaacctccccaggagcgggaacaggttctccgttcagcggggtttcgttaactgcggcatcttcggtcgtcgattcaagggccgtttcggtaccgttgagttgatcaccagttgcctcgggctataaatagggtcagtttagaaaaagaagagttaatacagcagtaaaaaatcacctgagctggttcatttgccaaacctgggacacttgggtctgcaatgctctctccaactgtggctggcaccgctgtgtctggtcccggcacttgagacttcgactctgtaggctccgtatgatccgccgtctccacagatgtcacctgctcaaccgcattttgctcgggagctgccgatatttttgtatctgcaggtgtgatactggatggtgttggaggcgctgcagattgacggtccttttcccgcttcttctcttcggtgcgtaggaaagccttgagcgtggtccgcagagccttgttgggtttgcagagatcgggcgagacgggggtgtgtgtacagacaggacatgtgtccgagagagaagcttggcctataacagagatcagattagctaccatttgcgacaggtgcggaactctccaacatacaggtctcacagatggactggtcacaacaggggagacgaaatgcgttcaccgccagcttattgcacatggcacatcgcagcttgaaggggatctcatcttgggccagggtactgccgaatcattagcatcgcgaatttttggtcggcatatgagtactccgtacctggcaatgtccatgagagctggcacatccgccaccaccatggctggagatggctggagatattagatgagctctgactagacagaaagctccagtgacatggcttcaatgtccggtaaaaaagtgtagaggttgatgctgtgaatttggtcggaaaaactatttagccgaagttacatgtcagagagaagtaagccgtgggcatctgggaactaagagatgacgccgagcaaacaaagtgcattgtgcgatgagaccctcagattagatcaagttattttgggcgttcacagaagaacagcgatacgctgacggtttcatctggttcaactcgacgttttttgcatttatcgtcattgggtatttggtattctacgggtgcctagagggggagagaaagggtggcgacctacgatgtatggacaattcagtatattgagaagttgaaggtaacaaagaggagagggagaatacaaggcaaacaagggggagaagggatcgaattgaaaaaaagcgacaaaaccgaaaattgaaaaggtgaagaatgaaaagaatgaaatttcaccgagagaagaggatgaaagggcaaaataacgtgcgattttgcaaaaaaacagaccaaaacagtcagacgcggtaaacacattacgaaaaaaacaacgatggaatttaaaaaggacagcgacgcccgtcgtcggactctcctctccagggagcttgggccacctacttttcgcgattccacttaaatctttttttaaattttttttcgcttgaccatgacagagaacaattatcggcctcgctctcctgatctatctcttcctcctcctcaacaatacgcgcttgcgagtccaattacatcccacgaatctcccttcttcaactcataccaacctcaccaacgcccaattctaagtcgcgtgggtcaacaatacgttccaccttatcagccagactcggacatggctcgccgttctagccgtcttgctcagtccgaccgtacccccatcccagaacccatgcccgaggcaattctaccaatcccagaggcaatccaaccaatcccagaggcaatccaaccaaccccagagccgatcgcaatggcgccggtccccgctattgcgccggagatagaggaagagatgccaccggcgcctccgagtgcggcgattgaagtaaagaccaagtttcccgtggcgcgcatcaagcgcatcatgcaggccgatgaggatgtcggcaaggttgctcaagtgacaccgattgctgtgtgtatgtacgccctttgcgctccccttattaccaatctgccagagatactgactagactcttttgatagccaaggctctcgaactcttcatgatctctcttgtcaccaaggcggcacaagaagcaaaggaccgcaactcaaagcgcgtcacggcctcgcatctcaaacaggccgtcgccaaggatgaagtgcttgacttcttggctgacatcatctccaagatccctgatcaacccgccagtcgcaaacacgaagacgacgggagcgatcaaaatgagggtcgccgtaagcgtggcgggcggcgaccgaaggatgaaagtgattgaggttgacccgtaaatgacttgacgacgtgctagatgggatgggtattaggcgcataacttcatggtggttctttctttcaggcgtttaaatagtgggaggcagatctgggagcgcttttgtctgtgaatatcttttggtttttcgggctccaatgactcgagcctcatacgcgcacggtctttttattcaaacaggacctagacgggcatcttctgttggaacttgaatctgtatgactgtaagtgtaaatctggaatttgcatgtagtactccgcatatgcttggaagttgatagttgatggtgggtgtaaagcggcgatcagcgcgataaacaccgtatccactcatcctcgaccccccgtcactttcactctgtgagatcatgcagtcctcacagaatggactttgtacgtgccccttacttctctatgatcttcactaatagaatatagtggtctcgtcttatcggcggctcgcgcgcgctgtccaacaaatcctccaaggccacctcgcccacggaacggctgactgcatttaagcgcgcctgcaatgccctccaggtaccgacgatgtccgcttccaccaggccaccaattaaccaattgatagcaaatatggcgctcgacaaataccccttcgggcgaacaatcggttacgcatgcgcggatgtacgttgaacgactcaactcgattctgagcgaggaagctcgcggagcggcaccacacccctgtgtggcctatgcggcatcatcccaggtcttcgtgaccgtgaccaagcttgccctttccttccacgatgaaggaatcatccgatcagcgacggtattcttcaacacactgatcgatgcagaggtggacggggtcgtggacaaccgattgttcgctcgtgcaatggtggatctggtccgccgcgccgagaagacctccgatgaggctgagggccgactcgtcgaattgctatttggtattgccaacaacattcgtctgcaacctggtatcctgcccgcgtggtttgtgcctcgggtgacacccaacgcccaggatagcgattcccaagccccaagtgggacggagtttgcaggagctacgaggaaggacgagttccctctgttctatctgctggtagactatgttcaccacgaaggacgcgctggggactttgcccgaacggggttgctctacctcattgaaaccgcatcgcggtctaaaaacctagagaaatggctgatcgagagtgacctggctacgctcatggctactggactgggcgcactctacagccagctcggacagtgagttcggttctttgatcattgtgggacaatatactaatcgaataaagcttgtcgtttactcctgccgccgaggacgataaccttcctcacattgttgctctatctgatcatggcaaacaggagaccgctttgcagccaaccctaggtcaaacaatggatgctttcatgtcctatctgttgttttggcaggacacaatcgaccactgcaaatctgccgaagtgaacgacaccttactagaccatttccaggtgctgtttctggagcaacttttgtgagtatacactcgtcaccccagaatggacttatcactgacccttgcaggtacccctctttgctagaatcatcagatgtagctggtggctcgacagcagcggtgctgacctacatgtgccgcattctcgactcaatcgatcaaggcgaattggtccaccgaatcttacatttcttactagcgtctacccctcagcctgaggagcaaatggatatgtccgcaagccgtcgcaaatcactcaatgtgctagctgcgctggcctccgaagcggctcatccctcaccctcactattcaatcttcgcgatttggccctactaggactccagtcatcgaactgccagacggtattagctacactacgccttttaaataccgttctccagagacaccatctattcgcacgggcgctgatccataccattcctactcagcctgcaaatcagcgccccgttggcgccttgaatgccgagctagagcaattagtagtcatgggaacgtccctcgttgatgaccccacgctgaatgagtcgtatgacaactatgtttcagatgcgacatgcgtgcttgaatcccgcctgtgtctgcccatctcttcaatgggggaagacgaggagacgttacctctgccattgcagctccagcaagatgatcccatagtgcaggcccttttcgagtgccttgaaactttctttactaacagtgtcatcgtcaatctggcattgacaggtgtgttcatgagtctggcatcctcacatctcttctccttggacgggtgggtgttggttgatcccaaccaatacgaggccccatcctcggaagaaaccgacgacggattggatgatgttagccgggcctaccaggccccaacttggcctgccacggctgctccgacattgacactagcgctccaaaaactcgtgaaccaggtccgacaatggcaacaagaactcccagacttcgatgtactggtcgctgcccgacgagaactcttgcaccaggatgatcgcccacaaacaccggaccgatcccgagagtcctcagagcatccagcgtcaaccaataattcgcgcccgtcatattcaggttcagccggtgtctctaccccagctgcccgtggccggtctccatacccggtcaattcgccctctatgctttctcatcgggatgcatcatctgttccttccgagtcgcgcggatccttgaacgcccgagcggtggccgccgaggctcttcgccagcgccttgccacaccgttcccgcctgcacccgcggatccaccgtatccatcgactggggaggaaccctcggactcagaagataccaagcaggctccaatcgcaaccctcggtcatgtactgacgaatgtggtcattctttacgaattcctcctagagttgtcggcggtagtacaagtccgaggaagcctatttgaagaggcaggatatgattttaattaggaaaaggggtgttgatttgtttttctttctttgtatttaaagggggtatacctaagtatcaatatacagtattatttttgtctcttcatgaacaatctatcaaaagaccaatgaggaatttgatatgcaactcagtgaataagaatagcaccagtggacccccgacgacgctgattggccactaagcccctggacgagagactatgaacccgccaagccctcgtgccgggttggcttgcggcgattggcgacttggcctctagacacgtcggacacaatttctcactcctctctaacgcatttctgacaatgatttgatactagccctcatttatacatcccgatcggactaccttcttttatatataccctcattgacggtatgactggccgagatggcctccatacgtcatgagtctcttgaccgtgaggaccgcgaggatgccccattcctcgactcccccgatttaagcaccccgggctcagcccatcgccatgtttctagcaagcccagtataggaagccacccattcaaggccaatgcctctgctagcaccatcacctttcgcctcaaggtgaccctattcgccatggtcctcgcagttgagatcggctttgctttcctggagggccccatggtccgaatcatggagtctattgcttgtcgtcagtatttcttgggtgtggatccgactaagatcggtgcggatggacaagtgcccgaggccatgtgtaagattggcgaggtgcaagctgaactggcggctgtgaagggctaccatatgttctttgatggatcactgagtacgttgattggaatgtttagcgctagactatgatctaattgtttcgcaggcgccctattggcgattccctatggtctgctggcagaccgtcgtggccgcaaatctaccctcgccttgtctcttcccgggtttgggttgaacgccttatttacaatcctcatattgtggttctcggatatatttcccctgcgtgcgctttggtttactgccttgacgtggttgtttgggggtggtccagtcgtgtcgttcgcgattatctggaccatgatggccgatgtaaccaacgagtcggaaaggtatactactcctccatgttgggcgtgagtcttatagatgctgatcaggtggaacagagcggaactcttttttcaatttgccatcgtatcgatgggtgccgacttcgcgtcaagtgctgttagttcttatctgatgaccttgaatccttggataccgttggtggttggattcgcaattgtaatggccggaatgatgctcattttggccctaccggaaacgaagcatgcactgccaccccggaaagctgaaccaactcatgtggagatgtcggatttgacacatgacaccgagccaaaaaattctatacatatccctcgcgtacccgaaccatatcgcgcagaacccgacatgaatggtgatcatgacgacgaaccgccttcttggagtatccaatcatactcgcaccgatctattctggcaaagtttcgcgcaaattaccgcttttaccttagaccctaccgcttcattctcaaccgaaaaccagtgctcctccttctcactgcgttcctagtctaccgcctgagccgaggctcatcttggttcttgacccaatatatatcgacacgttattcatggacactggcacaggccaacttcttggtatctgctcgtccgactgtgtcaatccccctgttcctctttgtcctacctttcctcaaaagacgagtcgtgaatccccgactttcctcaacagaaaaagacctctggctagcgcggcgcagtatattctgtcttactgttggaaccctcggaatcggcctctccccaaccattgcgaccctgatccccagcatgattgtccagacctcaggatcgggcttcgttttccttgcccgctccatcattaccactttggttgaacgtgatgagactgctcgcttgtttactgcgattgagattatccaatcattaggaaatgtggttgcgagtttatccatcaccaccgttttccagattgggctgcgtctcggtggagtttggattggtctcgcgtggatgatgaccagtacgctcttttgtttggtcggggtagccatctggtcttttaatcttcctccaagtcctccgacaccggactttgcggaggattatgacggggatgacagggcgtgaatctatagatcttgtatactactcatagcttccgtgcgcacttagagcgtttgttttttagtatctattatattatatatagcgatgtacgaaaataaccaatcagatagaccaaaactcaatacaagagatctatcgacgtaactcgctcgcctgcgtgagtcttacacgccgggaaaaagtgccgaatgcctcaggcataatatcacgtggcagctcgtctcgcatgtgattatcaccagcttgtcgacccgattccattgtcagaattagcccgagttcgagttgcaacctgtgctgccagcacgctcctaaatatacacttgtttagcgcatggcgtgttgatgattgggcctgtatcactgctcattctgcctaaacttgtcataacacgagatggagagatactcacagtttcgggatcgaggtaaatttgcgctgtgctaaccagcccccaagtccagttatactgacatctctaggctcgggaattgcacccttcctcccgatccccgttgaaccactcggcctccaaacgcctcttcgcattttccttttctgcttccgcctcccgctatttattttcgtcactcttagctattttttgatcctacaatggcttcctatcggatcgctgggcaaaaaggctgctttgtggtgtatacttggagttcccagcatctggtggattgaccttcaagtggacggagtgcgcaaagggttcgtgctgcaccatcgaaactatagcctgttctgctggtaactaaaatatccggcacaggtctttgaaacagcagcaagcacgtctgcctcaacccggctctgtcatcgcctcgtccttcacatcacctattgatgccgtgtacctggcggctatcttcgacccgatcttcacagcatcctaccccaacactcgccaggtcgagcgcatctctctgttccaagccatactgcgagccttcgcttcccccgcaacgcaaccggcccctggtgccctgatggtggatgtctcaagcttggtcgagaagtaccccaacagaccgattgtattgttcccagagtgtaccaccaccaacggccgtggcatcttgaccttgagcaactcccttctcagcgtacctcccaagaccaagatcttccccgttagtctgcgctatacgcctatggatatcgtgacccccctccctgggagctatatgagcttgctgtggacgcttcttagcaagccgacccactgcatcagagtgcgcatcgcggagtgcatcacaagaagccaaaatgccattgatacggctccctctctggcgactgcgaagtcgacctataatacgaattacctggacacactggaccgggacgggcaagaactggcatcgtccagcgagaaggcgctcctggataatgtgggcgagtcgctcgcccgtcttggtcgggttaagcgggttggcttgggggtgaaagagaagcaggaattttctcgagcttggagtaagagtcgtcggacatggtgatcttgatacatagacagtatttctttcgctatatttagacccaaacacattgtttcactctcgccaatgctgcaggtacatggcgcacatatgcagttcgcgagttgaatctaatttgctagatatagaaataactgtagaggatggatcttgatgaggatgaatatttgacctggcttaggcttggtttctatttaggtacgaatgatatcttcgtcatgtggctcgatgacccgtcgacacgagaccttagcaacttatcttgaacgtgtcaatcgtgctgattggacctgggaatagttggttgtaaattgggccaactcacgaatattgtgtaccctctgtcataggagcaaacgagattgcctcaacgcttgagacagaactagacctacctgatatgggtcctctcgtttgattctgtttgaaccttctctctctgtttctcagctccttactgtcttcctttgatcgatctgcatcatagatctgagggagaaaccaaccatgcttctaaaactattttttttggcagtcgctgcatcggtggctcttgctgcctccagtgaggcattgaaacaatgtctcgagaatgtgttcacagaccgagcaggctttgccttcgctggagatctattctatgaccgtattgtgaatcgctacaaccttaacattcccgttactccatcagcgttggctttccctacgtgagtactcttgaaagaatgatacattgtgttcctcgctcacaacccacagctcttctcaacaggtggctgatatagtcaaatgtgccgcggataacggatatccagtccaggccagaagtggaggacacagctatggcaactacggtgagatcctcaaattacagtagcacagtggaatcccacctgcaggctaacgtgttatacgtgacaggtcttggaggggccgacggcgccgttgcgattgacttgaagcatctccaacaattctccatggacaagacaacttggcaagcgacaattggggcgggaagtttgctgagtgatgtgacacagcgattgtcccacgccggaggacgggctatgtctcacggaatatgtcctcaagtcggttcgggaggacatttcacaattggtggtcttggtccgacctcgcgtcaattcggtgccgcacttgaccatgtactggaggttgaggtggttctggccaactcgagtattgtcagagcctctgacaccgagaataaggacctcttttgggctatcaaaggtgctgcctcgggctacggtatcgtcacggagttcaaggtccgaaccgagcctgagcctggtactgcagtgcagtatgcatacagtatggagtttggcaaccccacgaagcaagcggcccttttgaagagctggcaggccttcgtgtcagatccgaagttgactcgaaagatggcgtctaccctcactatgcttgagaatagtatggcaattagcggcaccttcttcggcaccaaggaagagtatgataagttgaacctaaccaacaagttccctggtgcaaatggcgatgcattggttttcgaggactggttaggtcttgtcgcccactgggctgaagatcttattttacggttggccgctggaatcccaacaaatttttacgcaaagtctacttcttggacaccccagaccctcatgaccccggagactatcgacaaaatgttcgattacattgctaccgtcaacaagggtactttaggctggttcctgttattcgatttgcagggaggctacaccaatgacatcccaactaacgctacatcttacgcccatcgtgatgtcctcatctggctacagtcctacacagtcaatttcttgggaccaatctcccaggcccagatcgacttcctcgatgggctcaacaagattgtcaccaataataagctaccctacactgcctacccgggttacgttgatcctcttatgcccaacgcacccgaggcatactggggcaccaatctcccccgactgcagcagatcaaagagctagttgacccaaacgatgtgtttcggaatccacagagcccatcccctgcaaacaaggagcctttgtgacaaagcatcgggtcttttacattcagaactagtcataatcaaatcattttgtaaaagggtttagaaacataagaccagaaatttgatttaataaagaagacatagactagtcatgcgttattccttctcgcttttctgcttcgccgcccactcttcactctgacgagaagtccatttccaacgaagtgcccacatctcttgatacaacttctctgagcaatccgggcacattcctgccttctgaaaaagtcgctcttcgggaattccaagaatgccgatattgagagctcgtagaacaacccccgagcaacgctctcgcatgagaaatggcacgccgaactctttacagcgttcaactcgtccgaaatgaatacaattgcacatcgtccacatgttataagtctggaaacacattttgaggctaattctctgtagctgagtcaatgggagagatacagacccggtatagtatacttaggggttctgttgctttgctcttgaggctggcttgtgattttggtagatggttatatatttgcggaatattcattgatctttgaagacttcgggtctttcggtctcttccttgtttctttaacacgctttgagctggtgagacatcagatcaacaaagacatacatagaacattgtctcaaaagccagaaatgaaaatgatgataggagtattctgtataacaaagtgtgaagttttgggtcattagttagctcaatggtaaatggtagccttttcagatgtcttttccgtatcttctgtgaaaacaactttgctacgtataaccttgaaacactaatattaaataaccaaaaatagcgagtaaacaaatctgccgcgtatgtaaaaatagtaaatgggtattgggtatttcaaaagctgctaatgggaacaaaacctctatacactaagccatgatacatcatgatcgtctggtcaaggcatctctagccaaagcatcaatgcgacgagaatacaagtccatgaaatgcataacgggatcaccaaagaccacacctcggagctcagtgtctacgatcccacaggcatccacattctcccgcggtggcagtgcaggagggccaccagggaccggtggcgctacaaacacaggttggctagtcggttggtctcgcggacgaagtagaacaagccgaccagcgagtgacagatcggacgagggagtcctccaatatataggagcggctttcttcttcttgtcgtacaaggctagcactgaccccggagcgggcgaaacatacagatctagcaatgagatgaagtagttcttgtcggcacgggaaactgggtcaccctcattgataaaagcgaaaaacatggactttgacctctgggcagtaggagagagctgcaagggacgaagcgatatgggtggagcaccaaatgtgacacaatgaatgtgtttgaagcagccgcggagatgaatgagttcggattgcacggctggagactcggataggaggtgtagatatagcaagctggcgacggcaccgcccgcggagtggccagtgaagattagcgaataggacatgcgtgagggatcttcttcaagaagactacgtagccgggcagcgacgggggcaaccatttttcgggccacggataggaagcccgagtgacagcagttggatgggtcgtctagaaatcccatgggaggaactggtgctgcccggacgttcacggcccagtcgaggaaactctgcgtgccacgtatggcgaagacaatcgtgttcatgtcgtcgattgggagcgatttgaccaccatggctttggtgccgtgtagccaatcggagtccacgtatgaatgccgttcatggcctgaaggcttgtcgtaaacccggcgcgagtacttggctgctagctggaggaggggatatgttggaggatagctgaatgcgagatgagcaagttgggctaaatatgaccggagtgtggagggtcttacaatttcagcgttgttaaatgaggcggtaaccgcgaattggcatacagatacaccttcgagaagtaatccacagatcttgttggcttcttcgcttttcgctttgatcgatctttcttctcgtctgactgatgaggaattttacaagcagcaactattgtcacaaatgagtatcattcgataatacaatccgaaccataccacttacttagttcagtttctctcccacaaaacgaccccaggtcgatcgaggtgatgacttgatctaacaaccgcgatgtggcctccttgacgtttgcgccaccacccaaactctggcggaccaaatgttcgagatcaaggattgtcgcattggtcttctcgaacgtatgcgataccaagctggtcattgactggttcaaattcgtacacgatgtccattttgaaagtttcggtgggtgagcgttccaggggggactgcttgaggcaggtgctgggaaaggatagagtggctgaggttgtatacgagccatagacattgccatatttggattatatgccacggtagatgtatgagatgtgttaaatgtatgaaatgtgttgactgaatacgcccccgctggcgacccatacggaggatcgacatatttctgcggtacccctatttccggacgtggtggttttggcggtggtttaggagatgtcggtctctttgagcgactcgaacggccaaaggccatggcgtatatcccaactcagtgtgtgtgaaatgcgtggagtgcctggattcaatatgggctatcctatacgtattctcaagaaccccggtccttgtccctcgcacatcgtacagcgatgtaaagcgaaaaagaaaaaggcaatgcaggagtcatgcaggtccttcatgtcaagcacgcgtaagaagcagggcactcccatcacgcgggttctccgtcgacttctccgctggccgtcgataggctgaaatccgagtacgagcacagccccatccgggccatccagggcgtccacaacaaatacgattggccgcatgggaacaaagcttggcttggcttggattcagcttggattctagagcatatgattgtgtcgagttcttgacgtcatgatatttggagatgtcgaatactaatagcaaggctgaatgtaacaaatatgaaattagaagagacgcgatgggaacaatgacaggccaatgagatccgaaactgtaaaaccatctacgctgaaactgaggaaggacatcggtttagtcgtttgttagtgtttcattcgggcgcacattcccaagagccaatcccacatgatgtatcatgttgctgacctgtcaatggtttagtagttcatttgtcaacggctgggacaggaaccgcagctctgtccggcttctttattgaccgctcggatatggtgatcaacttttcaatcgactaattcggtcacgatatcgtgactatcaccagttcgcatgtctgtagcaagcttcgtatgtgaaggggtatgtgaagggtgatatgggcaagatagggaatgaacagatgggaaacgtgtctttgtatttccatgtcttacctcctggaggtagttgtatgtaaaaaagggtataaaaagccggtctagccataaaaacataaaatccaatccacataatgactcattcagtcatcatgcctcgtgaataataatgatgagtaaaaaaacgacacaagagaaaaggtatgtgagtcaagaaagggaatagaataaagagcatcagaaaggggagaaaaagaatcgaaaggagggccaaaaaaaaaaaaaaaaaaaaaaacggacagcaaggcacattggagaccggctctatggcacttctttgtcgcctcttttcaaaccaccgggtacattgatagcatcacgcacccaatccatagcagcaatctcatcaagggtcttgcgttttgtgttgcgcttgagaagaccttccacacagtcacgggccccttcgagtcctttgcccttttcggggtcccattcctcgtcctcgtcggcatatctataccaagcccattcacaccgtgcgatacgatgcggagtccgggcacgaagtttggcaggatctcctcgagtgccaggcagaacatcgaagggtaaccgattctccatgatggcatagagtagaacaccgagtgcccaggcgtcagtggagcggccgtcgtaagcctggcccatcagaatttcgggggctgcgtagtcttcgcttccacaccgggtctgcaggagcggactctctggtggttcagggatacgtcgagacaggccgagatcactgagggtgacgacggcgcggtcgtaggtacgccagtcttgcacatcatccataacatgagcgggcatggtaagcagaacgtctggaaacatggtcagtataaggtctgcagtatcctggcaaacaacgctgtctcactttctaacttgatgtctcggtgaacgatgtaatgagcatgcagataacgcacagcatcaaccaattcggcaaaaatgcgccggatcaaatccgcggacatacgagctcctgatgtggcaaactcgaacaaatctccaccaggacaatagtccaaaaccaacaaagcacgcttttcatcgctgccgaatgctttcagttggacaagggacggatggttgaccgacttcaagatttctacttcgcgcttgagtgatatttccagtcggccctcatccgcgcctccagcgggtccatgttcgatgattttgactgcgaccagcttctgattgttgacaaacccgtggaatgtgccagctccatcaccatccggcgacaaaggcatcccggggaaaggttccacacgtgctgccaaactgacctgactgaatgtgccctggcccaatgtccggactttctggtagatacgggcctgctctgtacggaccgaccggacggaatagatatcctgagacgcggacagaggggcgggataacggataacgggttcattgtcactgtatccactgccactgctgcgaggcgggctgggaggacgaacggtcggcaatgcgatacctcggtagacagcgagatattgttcgcgatgaagtccattggacttcgaatctatgctcgacgacggggcgatcccaagcccagtattcccttgcattgcaatcggacggggaggaacagagacccggccgggtggtggtgcatagtcactcagactgcgattccgagaatgagaatgctttgaggacgagtcgcgacgatgccaattattcacgaatgactcttccccttggccatcaattccagtgtatggtttggcgcgcgaacggggcatgacggggggcccaagcatttgtgacgaatcgctcaggcgaagactggagccgttgcgcgacgctatcgacgaagaacgagataacgacggtaaatcacctttccgccacggggaagctcctccaattggcgatggcaatggagttatgtcacccatcgcattcaattgaggcgaggacatgatggatgccggggacaaggaaccactgtatgtaggtggtgcgatgagggcacgaaggctcggggtgcggtttggatagcttccggaaaaactggtcgaagcataaggatcggattctcgcgagctggacggtcgaatactgggtagatcggtgcgaatctgaagagacggcagtggcgaaacgtgattaagtatggaaggtgctatggaaggtgcgaaggaaggtgcgaggtcgtctaccgaaagagggctgtcaatctcctctttctttgtatgttcattgtcgcttgcatcttgaaacattgttgacatggtcgatagaccggacttgtgtatcattttggaaccgaaaaggtgttgggaggaaggatgacgcggccgcaaacggaaggccgggtgcgttgagttctatcctccgagggtgttttggggggtcggagtcacaaggtataaaacggccaaagataagagtcttggaaccccccaattaagcctccaagcctaaatggccttagcgtagacccgttaagggtcgcctctctactccgtaggtataacggaaggtcagaccgcatgcaagatggattattaagggggaaatgaaggaaagggggaaatgaaggacccaaagtaaatgcaattagaaaaaaagcgccacctgcgcaaggccgggcgatgatgcagcgaaaagaagaaaaaaaaaaaattcaagaaatcacctgggcaggatgaatggggatgctagtcagctgacgatcccaatatggttagttccccatgtgctccccgcagtgtttacttgagtttatactgcaatttcgatttggtaagatgggaataaggagatacggggataggagatggcatatattactttatcttcatatctattgcacactaggagccaattggatcagatccgatctcggtatatatctttaattctgcgttgatacctgtgagccccgaatctgattgctccgagttgtagttcccaaaggggaaggtggtgtgactatcatctgcacttttttgtgacctcggagctcagatatagattatgcctcatacatatcttatccgaagatcattctaccctcctacatattatgccgtacacttcattctctttccttcatacctcaaatatacctcaatattcaacccttgctcttggccctcgggaacgatagcttagcggctggaaccggaatcgcttacctgcatgtaggggccaaacacgtcctgtacgccactggtatagctaattttagcattcgtcgtggcttgcccccgaacccaaaatcgtgaaagaccttgctaaccgtatgacgacacctagtcccattgactgagtaccctttcaagttttcttcttccgacccggtaatatacgaaccaataaccaaatctccattcctgggagctgatgtggccccgatctaacccgttagaacccattctccggataaatcagccgcatgatgttgcttgggccatccatggatctttgcggctactgcgggagaggcgtcgaatggcaaggggtactatctacatgcaattaattggaggcgttatatggcgagatccaaggttggtgggggaagttttcgggtgttagggttatccactcttcttgccatcgtgaccaaggcccactactgcgggattgagagcaaaagacaagaccttccagttccgaacccgtcgatcatcgccgtccacggatgttccgtgctcaattgctggctgcgagtggctgggagaggatcggcacggacccgaccgcggtggggctttatatggtgaattctgtcagaccgaaaatgatgggatatcaactatcaagagcaaaggagtaaatattggctttggagtgtccttctcatttgttagattatctgcaaagtcattatcctttgcacacatcatgctcctcttgagtcggatgtctgcagatgcatcggactagaattctaccccacatgtatcgattgactaggctcgcgccgaagctataagctatcttgaagctcgctcgaattttcctatcagggctttgcacattttgcttcatctagaaaaacgtacaaatccttcatgctagtagtacacggttaggttgtgctcacgttgtgcaggagcatggcgctgtggttggacaggagcagcctctttcataacattggattgatatttattttagagacgcgataagatgaagacataacactattgaggcaagtcttgtattcaatccctcgggatgctgaacgccgaacgccgaacgtcaggaaattaaaaacaaagccccaaagcccaaacccggatgtgacagaatcaaaacaactgataccccccgggcaggggaacttgacagttccttttggcacacatttcccaattcgggacctctaccctctacaagccatttgactcagacctcattattatcttatggagcatggcatctcttccaaacttcgatgaccttcctcctgtcgaggggatgccgcaaggctgtgcatggggcatcttcgacaaagacgacgagaaagatgttctcggcaccctgaatctactcactccagaagtcgtcaaggatgctgtcacggaggtacgccaaggcgtgtctatttccttaaagtgaaatgcccttcataatctccagaatacgacctaataccactagttggcccatcgggagcatcaaaatcccagggttctttcgaaaaagcttctgtcacaatgtcatgaagttgaaagacgcagcatctggcagccactttggatttgacgacgaggtattgtgctgccaggttgttctctctcataccagagctaattaatcctaggtcgaatttaacacccaagccagtagtcaatgggatagtttctgtgagtccaagaactttagattcttgaattcaaaagagaactgactcgcaacccagctcacttcatgcacctcccaaccggcctcacctacaacggagcgaaaccaacaatcgatgcatttcagactcccgaatctgccccagatcttccaacactagaccgtaagcaaaaatccaaccaatttcaacatcaacactgaaaaaggctaatggaggacaccagactggcaccaacgcggctgtgtgacaggccgaggcgtactaatcgacttcaagagttacgcgcagacgcacgcgataaactacgaccaattctccggcttccgcatcgggaccacagagctagaagcagtggctacctggcaggggataaccttcaaagcaggagatatcctccttatccgattcggggtaacagagacgctgggtcagatgaccggtgccgagcagggcgctgcgatgagcagcggcaagatgtgtgggctggaggggagtaaggaaatggcgcgttggctttgggatcggcatttcgctgctgttgctagtgataacacggcggttgaggctatgccgcctatcatcgatggtgttgagcagcctacccatgagcttgtgttgcatcagtggtgtcttagtttgctgggtattccgctaggtgagctttgggatctgaaagcgttggctcatgcctgtagggctagtaggcagtattctttcttgcttacttcgtccccgctgaatttccctggtgctgtcgccagtcctcctaacgcactggccatactgtgaagaggacatgttttactatgtaccaacggtctcggtggatcacagtgattagacacaaatgaaattcccggtacttttatttgtggagatctaaatcgaagttctgtagccgttcatctggggaaatggttcgagtacccactttgggctccacatggcttagcctcttgttctgtgggccccgagtatttatagatgtaacatgccgaggtcaatatattggagcatggacggttaaaatcttaagaagagccagccctagtgtaatggactatagcacgttgggatatgtatgtttatatacacattcaaacaagcatgaagtcaaaatcagcttctcttgcaatatcctgccactgtatatcaacgtacggtccagccactgcccgccgattccacagagcttgaacgatttcacataatatattgatactctggatgccgtgccgactcttccggtgaaagaatgccaacattcgatcttgcagatcaggccggtcgcagtcagccgcaaccacaaaacttgcccagttataggaacagccacccttgtcgcgcgtgagcgcatcgacagattcaagctcgtgtatgcctttctcaatcagatcctgtacgtcgcacaatggtgcgccacgcaaactgcggcggaaatatacaatcgtcgcatagtagaatgagttcaaagcgtgttggacaatgaccgaaccgggggcgtctgggttggacaaggacggaaagttcaagtagagctggagttggagccggtcgagttcttcggtggaaagctgtgtctgggactcaacaagtgtggtgatttgagcgaggcattggaccagtggtattgtgactccatgcgattgttctaggtagtgatgtaaatgggaggggccattgaggagcgacatgagctggtcaggtataggaagactgcatagtgaggaaagggacaagtagcttttaaccaatctagcagcagtcggagtacggatccaatcgccatggatctcgttctccaggaggccaaggcatccagaaacgtgtgctctccatcggctgcggcgaccagacatagcttcagcggagatgcaggtaaggacagcggctaaagtgggctcatctaggcagctagcctgttgtaggcttcctcgcaaatgacccagagctagctggtcatggtggacggcgatggaatggtaccgcgaatcatgccggaggtgagaaagactaaaagcagaggaggcacagatagcgtggaagattgagagatggatgttcgattctgctggggaggcatcaaggcctttcaaagccagaggcaagaacactgcccggcagggattgtccggggtgtcaattaagagcatgtttccgctgagaaaaacaacccagtgatggactagctctgtctctggtcttgggagaaccaatggactcaaggaatcccagggggatatcacagtccgattgttgtagatatttgatattggtctgccgtagtcgctcggttctgacggcatatttctggggcttttgtggtgaacataggcgacttcattgatagacatatcaccgaccagatcattaggccttgatgataccgtgcataagtccttgtgggattcaaacataaacggcgcggtagtagatgatgagccggcctcgctacctctgtcgccatctgctaagtcgaccaagtccgagatatgctgtgaaacctccgtttcttggtctaaaagtgaaacttccaagttaggtagatcaacacaggttgaatcttgagtctctaggcttgacaaagagaacaccgagaacggtcctcgttgttgggcacagccatgccctgaacatccatctaactcaaccagtagttccgtaacagcggcagatgacaacccttggtccgcatctgataatggggctcgcaattggcgccgatgagagcgacgcccgggggcttgagaccatcctaggcgcaaaccataccctttgcacacccaaccactccgctggcagcgcccacagtgagggtattcttcgtcgcacttcactcggcggtctcgacaagtccagcatccagtgaaagtcttggtgcgtggttttgggactcttgcattatttgacgatatatccggcattgccaaggatctgggaagggtgaaagctctggcccgggcaacccatttgcccgcacgtcggcaatcgccggtccctgatccacgccgcggatgtttgccaccgccgggtggtattgcgccagcaaataaactaggtttaggagtatttcgttggctccgaaggttagtatttctacaaatgagttatatattgagctatagcctgcttttttgcggcatcgctctccaaggttaccgaatattctttcatctcgcagctaaaatgtgagtagaaatgtgaactccactcattagaaatcaggaagtgtgagaatttgtctattggaagtcactagcagcattagaatacgtaactgacgacacttgcaagcgtcatagccaatgaatcgcaggtatgcaagagacttttctatgtacacagaagaaatacaaagtacaaacccagttgcacatcccattcccaacccacgcataaatgcgaaacatgaagctcgaagcgccggagtgaggagacccgcaggggaaataaaaaaaaaatagttgtaatacatcgcaggcggaaagacaaggcgaggcggctaatagtcaaccgccaatgtcgtttaagggtagcgtggagggtatggagtatcggataaccgagaagcggagtagggtaaaactggccaagctagcaatctagaagaaggcccttcgggtcacctgtaggatcgaggttagcaaaagtcagacagcatatcacagcaatatacatacagcccaggcaccagcaatggtagccacaatgccgccagagatcatcattggcttaagtccacgcgtgctcttgaagaccatgccgctcaatgcgccggccacgatgctgttagtcgcgtcatgcttgcctcgcacatatccgaggctggagttgaatccgttgtaaaccatagctacaacaccagccgagtttccgaggaacggaccgcgacgggtaacggagttgagtacaccgttgagtcgaattttgggtgctgccgtgggtggtgtctttttcaatccttctacaagtccccacgcgcctccagtagcgagtgcaacgagataggtagtaccggcaccataacaaaggtcatctgaccatccacgggatggcaacactgatcgggagccggggagttcgtcaagggcagtgtcatcgagggagaggtagtcgagggtatcctggttcaaaccagccagaggatggaggcgagagggatcgggaatagcgacctcggagaggaaggatgtggcatcttgcgcggttgaagggtcgaaggcctcgggcccggtttgcttgcggccgctgagggagtcccagatggacattgtgaaaagaagtatagaaaaataaaggatagaagataaaattacaagaacctaaggagaaccttggaaggcagggacggatgactggaaaagaagtgatgaccctgtgctcgcagctccactggcatcggaacagcaaaaacttcggtcccgtgacttccggcgatctacggagaagaatttggccgagggatagacgcttaacccgattcggaatcccacatttatcacttggcggcctgaggcatcgcggggagcataaatctctaaaaattaaacgtcggggagatctttttcgcgtaaaccgttatccaagataccgaggcttgtgtgattggaactctgactgttggtgattcacgtcaggtgcaatgtgtcgtatcaaaatggacgaccttgcgcagattgtgcagttgttctcggaaaaaaccctccgagatatcgccaaaggcccattggtgaaattcacactgacatgccaagacaccgagtaagtgaagtatatgttcaatccataataactaatttgttctaatatttccacaagaaaggtgaaccgggtatggcggtctttggttctgacgctatcgacagcatctatctcgcaacctcattcagcagaggcatgcaatgctgcctctgcttttattgatgctgccaccaagtcacaatgtgacgcgactcaacggttgattttctcacaagaagcatggctgtcaatattcgatatttgtttgactcgatatgaagatgcaaagccaaagcctgttaagaaactcctcgcctcggttattgctatcctagtcaaaaatcaccaaggaacaacgagagcagcccttcaaaccgcagtcattgatgccataattcctagcattgtgcttggggagcctcaatcacgcctgaaggggtgtctggtatttttggagacattcatcagaagggatgccctgttacccagcgagtttatcccattgactcgccagtggctgttaaagaatacagataaatgggcaaatctcttcgccaacgatcatgaaactctctccctaggcgaagcgggccccgcttttgacattgcatctggcagcctgcccgatgaactggcaacgaggatctttgttctgggactcttgatccaaaccaacaataggaccatggccgtatcagctggtaacttactggcaattttgatccagaagatgaagcctgaaacctcaccggaaaagctgtcagcgatgtgggtactcccagtgagacgcatggtcttacaaaacatagaaaccttggaagatctgtcaaataggctcctgcagcctttgtttaccatcgaccccaatggcttcaggatcttccttgacacacttccagtcaagagccttctcaaaggtgatatgactgatgcgcctgaggcagagtatatggttcttttcgctgctctgcagatcggcaagaaaaccaacctggttcatgaagattgtgagtggcattgttgacctattattattggtgactggctaatatgcgcagatatttttaatgttggcaaaatgaaactcgacgaaaatgaggtgttagtcctgaagagcgacgtgatcggcaactttctcctgcaccgcgaggccaatatccgtatagcagctctctcgctgttgatcacggcattttccacagtaaagccatttactgttggggcaacgaacgttatccttcgaggactaccctcgatgcatgctgaatccgacgcatatactcgcggagaaattctgagtctgacacgaaaattctttgttcgtctaagaggtggcattgttaaagatgaagacgttgtttcacagacagacaaaacagccaacaagccaggtcaaggccaggtcagaaatgaaactgaaaccatagagttcctaaaggcatacctaaagctattgggtaatgatttgcgtcttgcggcctcatattcgcgccacataacggcgctcaaagctctgaagcttctgctggactccggtcttgatccacgtttagaggtcaagcttcaaaaatcagagatggaaaatctttggaaagttcatatcgaagtgtttgatgcccacctacttcggttgttgattgatctcctgctagatccatttgaagaagttcgacaaacttcgctttcgatcttgattctgtgccctcgagagattctgctcaacggcttgcacaacaagacagaccaacagtccactgcgggcatgcggttgacagatgcaattacccgagcggaaagccttgcaagtaacacgagccgagctgatcacgctgatactgttgctcgtctctatcatatcgtcttttgcgcagccctgccagccaactccggtcaaccggtttctgattggtggacaactaaggcatcagtagttgacacaattttaagaaagcttgaggaacgtctacttgattcaaagacccttttcagctcaactatgcgcgaggcaccacttcatggatatacgtctggtcttaggtatgttgtcccggtccgtatatgtgataaaattctaattgcaattccaggtatattgttcttatgccaagcttccactctctgatatctgatgactcgggatccgctgcttggcggtctgtccatgaccgtattgttgcaatttgcgataagatctggattgaggcgaagcctttgctgtgtatcgattcacccgaaggtcactcggacgagcctaccgaggacctgaatgtgggacccaaggacgccctttcttattcctggagatctcttcgcgaagcaaggtaagttcaaatcttttttgactatgcatgatcgctgactggagcagcctcttgcttcatgccaccatggtaaacatcagttacggaccaagcggcaacgatggactcaatatggcggatttcgcaaacattggaggcgtgagcttcacacagttggctgaacttcgccatagaggtgcattttccaacgtttcacagacatttgcgacatgctgtcaacgatgcagctcctcgaaggatccggcaatccgagaacttccgagaacctggtaccaggaagctaagtcgactatctttggctcggcatctgaactcacccgtcggtctgctggcttacctgcactggtgactggaatcgttggttccgatcccgggactcccttcttcaatgaggctattaacgagctccacgagatctcatcccttcccgttgagtacgacaaagagagacagtacttagaactgccccaggttcatgcaatgaattgcctgaaagatatcttcaccaacgcgaagcttggctcccataccgagccattcattatgaaagcactgacgctgtccgccgaacgccttgggtctccaatctgggcccttcgcaattcgggactgatgctcttccgtgccctactcacaaaaatgtgccgggccattcccggcgctgggcctggttttggaggaaactcgggctcagagccaggatcccggataacattccccaagtaccctggtctacttgaactgctctctggccttctcacaacgacgcagggcgaagcagcagaggggactgatattattaccgagcgggtgttccctgcgctagaactcgttggggacaaagtccctagcttgaatgatcctattgatgagatgctacgcgggttggttctggagcacctgagcagcccagtttggggtgttagagagcatgcagcccgtgtatatgcgtcgttgttaacccgacaaaatatcccggaggatttatgcactcttgtcaagagtccctcaaaaatcaccgagaattatgttcacggtgttgctttgtgtgtgcgatatgcccttcgtcgatactccttcaccaccgatgatttctggaaatgtgagtccgctgaacaattcctgataagactgtagttaatcatttgacagccaaccttgatgtacttttcacgaccttgcgcactgtattagaatatctgttccgtgttggaaaatcgccaactgtggcaggcgagcttgttgaaattctcaatggcacgttggagcgggcgatacaagcacataacgaaagtgaggatattcaccagagtaaagaaaatatacgtgctaacagatctatagaccaagttatctcttttataaacgagatattcgaggttcacgaactcgatgagattttgagatttgtttttgacgcttctcagacaggatggaacatctcaagcactagccgagcatctgccttacttagaagagcgcttgcttggtgcacaacattgaaaatgcttacttcccagcagtgggaacatctcccagcattcatcattggagtatcgcaattcgatgcagatgtcgctcgttggatattagagcagctccacgaattagttggcgaagaagacaggtacagacagccattggctgacttgtattcgtctgtcattttgggaggtagtcgacctgatgtgaaaacaatggccgcatccaatttggcttctatcgaggagaacttgttatcatcactgtccgactttgtgccaagcatcggtatcccatgggatgctattgcaatgagcttccgccctgaaacagatatcacaagatggaaccgagaggcaacagacgccgagctccgacttcgaggctgtatactggccacccggctatctgttgatcaagcagctttgtcctcatctgaaggcgatatccaccgctggactatcaagcttcgctctgccttgagcgaggagacagtgagttttatcgagaaatttggcatacaatcgagtcactgatctaatctttttcgtttcctaggaattcacaacccgttttgctgcagccatatccgttggcagcttttcacgggctcttagataccccggttcccagccacgtgtggattcggtgctactagatgtctatttggtcttgtatgacatgcttaatgatgacgatgacgaaattcgcgatgtggctgcgtcaagtgcctcttggattctgtcacactcgtcagtttcacctgacgccgacgtggccctggcgcctcttaatgcaagtgccctgcttgccgacttcattatcgataactattcagattccgcacgcctcgggcagcgggttcttcgatatttgactggccaagagccaaggatcagtggatctgatgaacgcaatcacccagttgccgtgtcagaccagatcacagagtatcgccaagagagcaccgtcctcttcgtggaggagaaacagaatctgtttatcgatgatgtgcgtgaggttgatatttggtcgcgagctctgttgcggttgactccctcggcatacgctaagctttcgttggatgaaatttctgcctggacctttgagggattaaattatctctgctctcttgttggtgacgaaaaagagccagatggacttcttggttgggtctcgaagcccgagatcttcaccttaggtctccgagttattatcatctcgtctgctctagcctcacaagtcttcacagcaccagagagtctgcaagtgcagccggctgccttccggggatcactcaaatccctcttggacgcaggcaaattgtcatcagtccatggggattggttgtcaaggatccagactgcattggaaatgtgagatgtaatgtgcattaaaagtgaaaccaggataactagttacatatacgttggatagaagatcaaaaaatatctcgtttgccatgtttgcgagtctgttttctctgctccttcctcatttcctcttaccttcttcacttgatgtcgatatcctatttaagacctccaatcaatcctcccactctccaccctcttcattctcctctttttgtttcattctatgcccattcatccttatctgacgtacaccacacaaatccattcccagcactgcagctgcacgcactccaaacccgtcacttcgagtcactctttcgctactgagttgcaccatgaaggacaatattctggtcgcagtttttctggcgatagcgttggtcaccccggccttcgcgtggttgttctacgtttggtatcggtcacatttggcccaactgcaccaagaaggccgaatcatcaacagaaggaaccaagatcgcgcccaggccaactatgagcccgcaaacggagaccaaaatgccatatttggaccctactttacccctcgcggatgggttcgaccaaaggcccgaagactatcccatgtcccgccacagtacgttaacccacggcagccgagcggtaacccgaatcctgaccaacctttccaaggacaaacccaagcgagcacgcatagtcctcagatggcgaaccagcagccgaacccgttatctaaacggcagcaaagaaagcaacgagcgttacaaaacaaacaaaggcagcaacaggaaagacagcagcggcaaggccaagatgagcaacagagcaagcagaaccaacaaagccagccgaaacagaaatacaagaaccaaggccagaaccaccagaagcctcacagtgctcattcccccaatgcccaggagggccacgacgagcagaatcatgaatggggagacacagaagcacaaaatgaccaaaccaacaaccatggtggtggggatggatggggagatgatgacggcacgcgggacaatcagcacaatactgggcagaacgaggacaacaacgattggggtaacgatatcaacaatgaccaaggagatctggtaaataatggatcacattctccacgacgagacaatcacaatagcccaagggaaaagagccctcagtgggataacgaacattacgatgaccacagacacaacaatggaacacgagaaagcaatgaagagcaacaccatcacaatggatggtccaacgaccgccctgcttctccacatcaagcgtcaagaaatgaagcggatccgcccggtggttggggtcaggatgacaatggtgcacagcagaacagccatccacgaagcaactattccaacgaagaccgtaaccgccacggtgaatggggaaatgatgatgcaaaaatttacaagaaaggcaaagacaactaccgtgcatcttcggaacgaaggtcaagagaccagtcaagccccaaccgtgactggggacaaaatgaccataaagaatgggacaactccaggggacatgaagaagaataccgtggcggtggcagctcagcccggagccaaggtcacaatgaccatgaaaaatggggtaactccaggggacatgaagaagaataccatggcggtggcagctcagcccggagccaaggtcacaatgtagacagagacaagaagaagaaaaaagaacgctgggtgattgaattggaggagaatgagaagaggcagcgtcgtagtcaaaaccgcgaacgctcggatgcagcatgggaaaatcgaagccaggcttccggctggaaagagaaacaggaatggtgaattcaagttgattatttcgtgtggattggggtggggagttttccagatttctggatttgcgttcatgatagtcgatatttcttttctacaacctgtgtcatgccaaaaatctatatctcatagctaaatctcttaagacttctatacatttgattctcaaacacattgctcgtatatccatagctatactaatgaaactgaatcgaatgaggatgggatgttcactacattacaggccaagacttggggctacccaagtcctaacaaagaacctcgagttcttcatattccgcaccagccaatcctctcttgccctaagattaggaattcatagtgatagggttttaggtctatcaatcgagtaggagttgaagctggaggagctgtgattgatttctgagcgatatcctacgctggaaaaagcccggcttatagaccaagaaagaccaaaagagctagctatatatgttgttctccggtagaggccgcaaacgcgagcgacctcattgttcacctagatcgagagccccattagactagatgcgttagaaaacccagttcttgcataaattagagtcttggcgttcacaaacctgcaaaatcagcagaattgtgcacacaattagcgtgtttgtatagtttataaccgttttactgcaacgttggagcttattttcttcggagaatgtattaagattgtatccgctttggcagaaatatatgtattttggtaaggtaagtcacaaactgcaaacataaacgatcaaatataccgagagcaaaaagttgtatatcccaggacctgacgccacagaatgcagacaaggaacttttaaacagaacgggtgatgtgtataagcaatataatcgcgagaggtgaataaaaacaaatctatcagcgcgaaacagacgacgaggcgactgtgtcaggtatgttggcgagaaagaaacacgaaaatgtgcagaattcgatcccattctcgaaagaaaggggatgcggtggggtttgggcgagactatcccggaggtctataggtgtcgagggtagataagggaaattaatgacgatcaggcttgagcgataggccatccgtcgacatatttgagaggattaaatcccaggaaggcgtcctatgattgtatgtgttagatcaaatcttgatgacgtttgtgcaaggggtaacagaggaggatcgacaggggtgcatgaaccacgacaatcgtggcccacaagtctgccaatattcaagtgtgagctcacctggaatgcaatgccaacggtcgtgttcactgcgatgaggtcagtatggagttcaaaaattgtatttgagtctaatttgagtctaggggtaaacgaacagtagtggtagtagagcacatcggtatcgccgtcacggatcacagcttgcccgcctggggcataggtctctccgttcgagccgtagacaagttcgccgccgcccttgacgagatctgtaccgttcttgtctgtgaatggcccacggggactttgagagcgtccaacgcggatggaatatctgaagtacgtgagtatagagcaacaagtcactagatagcgaagacttactcttgaccagcggccggtaggttgtcttgcttcagattacagcagaaaccatggctaaaccagagatagtaccatccatcgttgtaggagataaaagcaccctcaataggatggggaccggttgggtcaccacagatgttattggccatgcgattcggcggggcgagggattctggttcccacgccagctgacggtcatcgggttcagtagtgctcgctggagagaggaggtccttgctcagcggaatttggaaaattccattccagtagcttccatatgtcaaataagcatgtccatcgggagtgaccaatgtgctagggtcaatggcattggacttagtgtacggagaaatttccgatccattgcccgtgccagtctgaatgacaatgccgtgatcataccagttgcctgggccaggagagttagaggtagccacgccaacagcactgtcgcggcaaccagccttgctaacactgtaatagcaatagtatgtgtcgtcgacaacgataacggtcggggcccagggtgcggcacgatcaccctttgggattacactcttggcatccagcacactgccaacgcgcttccacgggccagccaggctaggcgcagtgtcgatgaggatgtgttcgccaacatgataaagataatactcatcgcccacacggacaatagtaggatcatgtgtatgttgctgtgtctgacgaggagggggaaagcggcttatagcctggtcacttccgagatcttgtgacttctggtcatgctcaaagttctggtctcttcgattgatacccaaaccaagaccaacggagaagaaacatactaaggcgagaaagagaagcatcttaatccagcgtcgagggaattgcttccaaaaagactgatgtcgaaatccatcgcgatggccagacggcgacatcgaccgtgataagtgaccggccctgacgatcatcttgatggaaccaggtacacatcgttttcagtcgacgcacggcgttgccaccctagtagggtggagttgatgatgcagggcagcagggcagaggggtgaaggagctgcgacacggtccactggttactcaatagaggcccacaattggacatgcctgcagggtttcggaatgccgaggtaataagttgttctgtatattgcaggagatacagatgggttattcgccttggcgtgatggaagcggaagggatgggaaggcctcgtggcacaaaagatggatcactgttagaccaactacatatcaggcgattgaactccgagatagtcgtacaccgtaactttgtacataaattagtgaagtcggcaagcaagggaggtacctgacttttgaaatcaatcggttgcagtgtcgatcttccagatgtccttttcaagtcacgggaagtgattggtcaacatgttcggaatgcgccttttgccttttaaacatatcgctcttctccaaggaggatgaaaacggatataaatccatctaggagcaagcccttttctcgtttgacacctttctaacaatatcatcctgtagggttgcaggtacgagggcacgggtaagacagagccttgtccttgtccgtctagggctactactttctatacagaatagcctagactcaagagaatcggagttaaaagaattggatataccaaatttgttccagcgaggtgagtagtgacaagtagtaaaaagtagtaaaaaagtaaaagatatccgccgaacgccagcgccgagctccatcagactaaagatggagtatagtcttctatcgagccacgatcttgtccacctcatctctagcttcggtccatgtctccaggttcttgcgagcccagtccaagtgacaacgagcatatgcgacctagaaacccaagtttagtcttagttttcaggtatgttagggggccaatcataccatgtaccgtcgcaggtcagcttctttgtccttctggaagcgcttgagatcattcagcacacccgcgctcgcatccttgacgtccttttcggacacttctaacgcttgctccaactaaaaatcgagattagctttgaaaccatctgaaatttttactccgtggcccacatacctgaatcaaactttctttcgtctttccaatctggtcccgacgtgttcgttcgggatctacatcagcaaatccgtggatggcatggctgatgcgaccgaaaattttattcgccacaaatgtcccgctggatgtcttgcgatgaccgtgtactgacgggtccgatctcttgagtcctccaatctgcgatccaggcagagagcttatagaatcggtgtgagtagattggaggccagagtcggctgacattatggggccgctgcctccttcgctggcggatgaagttgacagagaacgaggcttcgtcgttccagaatgagggttggtgcgattgagatactgctcgatacgcttggcttctagttcactgcgctcaagggagtctagtaaagtttttttcttcgacaactcatcgcgagtcatttcttgttgtacccgcttgagcactctgtatcgtagaactccgcgaaccacactagcaaattgagcactctcccgcataggttccgcaaaacttgcgctcagagccgaggatagctcttcggtttcaatatacgaagtatctgcagcctggccgatgcgctcaatggcggcagctactgttggtgactgttcagaaagagagaatccgttgtaacgcgctcccaactccatgaggtcggctgagagtccagacaaatgcgagagagttcgtcgattaactttctcaatgttgccctgcaaaagtagttctagctcacgtgtagaagcttcaaaattaataaagtaagggtccagttcttgctcgctaagctttcgagactcaggagggaaccgcccaagcatctcaggtcccgggaatgagggctgctcttgctcattcggtgacgtaggcgatgctggatttgcgctcgctgtagtaatgccaccgctggtcttgagctttgcggatgcagagggaaccgggagccagccatgggctggtgtgggatttgcggggtcaagaggtggcgctttgaggttattctttgggacagatgatgcaggatgggagctcaaaacctcactctgggcaaaagttagctaataaactcgtcgccaggagcctcccggtcaaacctacccagctaacgttgggatctaggaatctccaccacactccatcctcacggatctccttcatacaccgacagcggttgagaaacacaccgagcatgcgctttcggagatctataatggccatatcatctttagccctggtaggtttagctgcgtagtccgccatgctgtgcttctcgggaattggcggaacaaccaaggtgggatgcaaattgacaagcgtttgtcgcaatgatgcaaactcggaatatcgacggcgcacttccaggtcctatcaacacttagcattgtacagttccccgccaggcaccattatcataccgcagtccgaatcgtgtaaacaataaagcccccgcctccctcatggtttttcccggcatctgtgatcaagattggcatatcggggttttcataaaggatctgttcaatgcggctgtcatagacgctcttccgggggtattgttcactggcggcaccatactcggcctcatcttcgggatcgctgagatcgtcggtatgggtgatgtaatcgggaggctcgccgttggagtcgcgactagacggaggggatgagtcgtgttcgtagagagctggctgctgtgagatactgatccaaaggcagaagcgttagggtgcgaaccgagcggagacttacgaggagagagtgcggctgaatgtaaagagtcagataggccggactgatgttggtcaaaggccccgtagggattgttatcttcgtcgttccacattatgagggtatggacgctggataagaccaactagcaccgcaaactgagttggagaagctgtgcctgggagatctgcgggggggaagtcgtggtgtggctggtgcagggcggtgttcgcgattacgtcatgaaggaggcttgaactccaatcttcatcgatggaatatgggcaagagactgtaaaatgggacagccgatgaaaacttgaaagtgtttggtagatgtcttgtgtcctaggatctaatggttgcgatgattccagcttgaacccccgctggtccaaaagcggtcgatgtatatatatccatggatcggtaggctctaaagcaggacatgaaatattaccgagccagtcaagcttaaccaatatatcccccaaacaagattggaagggagttactctacacaaaaaggacttcgaaattaacatcaggtcagagcaatatgctaataaaaaggtgatttatgctgaagggtgcatgtatggcaacaggctcgaagtaaagaggtaacaaatagttctagaaccgatttccatatctcaaaagcctcagatgttgtcccgccgtgtcctgaacaagcatcaaagtccataaagttttctcgtgcagtggaatgactcccatatctcatatctcaatgtttctgcgcccagtgtcttacgtctgatcggcaccctgaaagcctgcagcatcgtgtgcatttcgtcccacctgctctgtattgtgcatagttaataaagccgggttgattccagcaactgagctttgagtgcgttgtagaattgggagaggtggcagcgttggagactggggaggttgcggagcagagagcgagaaaatccagctattggccttgtcgacgaaggaagtagggttgtggccaaagtcaaatccttctctcaaaccatgatccccactggcggtgagtgaatgatttccataatggggttgcggctcctgggagctagccagagtaatgttgggttggttctggcggcgttgacgtaggttccgagtgaactcgttgtgagaagaggtactgtcggaagtgagagtgacagaaccaagttcgccaacctcgaggcggcgttcaactgggtggtccaaagtgtcactactaagccctagcgcaaagctgggagaagtggtacgggcgaggccgattccatcatgaggatttgcagcggatgagttgcggcgagctggaatatcgggaaactgcaagcttggaccgatgtcaagcacactaatctcactttcgctcaggactgaagcacgggttcgcatcgagtttgggacggtaggacccggctgtccattggaactcgagctttgagtcggggcgggggtcgcgtacggaggcatctcatttcctagaatagaatttggtctctgggacttcaataacttgagacgcaagacctcgagcctcagaatatcgagttggtcgccggcactttggtgatccaagtgtctatcagcgttgtcggcgttgatattttcaatcagcgacctggaactggcagcactgaagttgatagcctctggacataagatagatacgttgggattgagctcgaatggctcatggctggagaatccctgaggcttcggagaaggcgcattgcgtttcatttcgggatgagtgcgtggatttacggaggttgggtgattgaagtgagagaagcgtggcaatttggagaccatttgcgtggaggtgattattagcacgcaccttgccctaatacggaaggagggactgtagggctggcactttccttacaaagagccttggctacatgacttcctattctgtacagatctatgtacacatcatgcacatcatctgctcataccgtatgtctgtatgcattgcttccgacatggagtccataaacggagatgtctaaatccctgagtgactttaaatgccatatattccgataggtaaatcaatgcaggacattttaaagcacaaatatattttgcagttgccataaatattagtactatgagtgcttgccaatctcactagctgcacaagccctcttgtacagcctatggaatttcactccacggaatcaaacactttctgttgactggaaaccgctagcacatatataatgcatatagctataagaccagagtcttgtctagtacagcatatatgctgataatgcaggaagaattggacaaattatatataagagtctagcactgaaacactgcccgtgaagcaagttataccaatcccgaaacaaatatgtctgcatttatgatccacttaagcctcttggaactgtcgtttgatagtaaactgatcgtgttctaggtagataacaatgggagaacagagaacaaagaacaaaaccatcaaacttcacagaccgagcgaggtcaccttatatggacacacattgctagcaccccttgtcgacaagactaagtgtagagtcaaagtgtggacaaatttgattccgtccgacctacgataaaggaagcaaggccatagtaggcctacgccttgtatgtaacgattgtatgtagcgatgaatctgatactcaagtgatgaacttcatctacaatttcgctatatctttacgttgacctgaatttggcctcactcttactttgctttgagaagatgattgaaaaaactaaaacaagaaacatgatttttattttgtatgggccacctgcccatcccccttctatgtagagaaacatcccccccccccccccccccccccccccccccctcttttttnnnnnnnnnnnnnnnnnnnnnnnnnnnnnnnnnnnnnnnnnnnnnnnnnnnnnnnnnnnnnnnnnnnnnnnnnnnnnnnnnnnnnnnnnnnnnnnnnnnnnnnnnnnnnnnnnnnnnnnnnnnnnnnnnnnnnnnnnnnnnnnnnnnnnnnnnnnnnnnnnnnnnnnnnnnnnnnnnnnnnnnnnnnnnnnnnnnnnnnnnnnnnnnnnnnnnnnnnctcccccctccgcccctcgtccccttttgtttttttttttgtttttcttttcttttttcatatcattcatgggtccaaggacatgatgtcctcggaccccacacgcagttccacgactgggagatcatcggaggaatcctccccctcacccccagaagtgagaccaaactgaaactgagggtcgatgcccatgccatcaccccatgggcatcgaccctcaaagacgccatcctcggtggcagaattaccaccggcaatctgtgagatgtcgtgagcggcgtcgaacgaccaagagggttccgtgagcttgctgagggagtcgacctgcgatcctccgttctcgtgctcaaagccgtttttcttaccttcgctacccccgtcctccgagcccgaagtactctcctcgacagaagagtacagatcattgccgagggaatcctgcccccggctcacacggggtgccactcctgccctggccaaggcagacgacaccttgcggggtgcgctgccaatggcacgaccgccgtcctccgaaggtgattgggacccaccagggctgcgggaaccggaggaactgccagacacgctccccgcgcggttccggtagccttcgactaggtcccgcagctcctggttaccaaatgcacggtcggagcgacggcggtagaacaggagataggcacccgatgtgatgatcgactgcatgttggtgacagtagtcgcagaggtatctgaaatgaatgtcagtaagatatctcccaattagcatatggagggggcatcgaaccgttgcaatagacccaggcaccggaaacaaagtccttgatgtaggcagtgtagtggccactacccattccacccatgtggttgtcgacagcaatcaaatcgtacaccgcactttttccattcgcggggccttccacgcggctgctcaagtctagtccctcgaaggggaagtcgataagagtgctgatcttgtgtccgtgcctgccacggaattggctaaatcgcttgagctggatgaccataatatccgggattctccacagctcaaacttcttggtggccgaaacgtgagttttgcactgaggacaaaaccagctatctgcgcgagaaagaatttcctccttgctgaactcgtccaggcattggtcgagagagacatttgtttgcttcggtttcttctggcttaccgccatggtatgatcatagacattcttgatgctcatgtaggtagggcagccacggagctcctcgggatcacgtagcttgccgccgaaaagggcatcaaatgcatcaggagtccagtcaaggagaatggcatcgccttggtgaaggaggggtagtgctgagtttggtgtgacatctgattcatctgtatcaacgtcatcttcggcattgtcatctgcggagcttttagataaagcatcggatccctggcaaatattagcgggttgattatgaatggacaagatggaataaacaaccttagtagaagtgggaggagatgggatgcgagaggaaatagaagggtattttttcagggtggagatgttgcgtccatcaggcaaagtggcatttgtgctcatgactgtcgcatcgaaaagtgacaacaaactggcaggaatcttgccagcaagaggatgccgaggggattcgacagattcagagtcagaatccgactcatcggagctctctgcaggcttaggcgcttgctcagcttgcatagaaatgtcgacgatgctgtcttcgccgtcaacagaagaagttttgattcgggaatctgctgatcgtgcatcatcctcgtttgtgaccacggtgtcagagtcatcagctgcattgtcatcggtcgttttttcttcgacggccagaatgtcgtgtgtagtcagattattggcttgggtcaagagcttgcggtaaattgcctcgaggttctgagtttcgtcactagaaagacgtatgaaggatgggattccgaaaagttcacgagtgggctctctgtccttgcgcggaacaagtttgcggtggaagacgggtacaaggattgcatcaccatcggaggtagtgtcagaagagttggtagatgctggaagaggaccaagatcaaagaacacaacggtgtcttcttgggaaatgcgtagactgccgaaagtatagtcatcgtcgcaaagaatttgccagaaggaattgtgcaatgtttctgctgcaaagatttgttctgcattaactcccaccttttgaccgacaaagttcttccagtccttcaaagtatcattttcatccaggcggactttcagagacaccggtgggccatcaagagggtaaaagttgattgttcgattgatcagtgttggacccgttgggatgggcacagtgaccattgtgaaaggatccatgatgatgctggtcttttcacaattgtggcagatcaatgttgacttgtacattccagcgaacagatcggtgataacggaggcgttacgggcctcgtagagctcccaacacttctttccgaaatcctcaagagccttgcgatcatgaatcatctcatcagtggaatcaggaatgacagtggatggcttgctgccaatgatccggcttagatcttccgacagtgcatcaaggagaaacatcacaaattcctgactatcatgttgatcatagccagcaaactcttcacgttgccgaccagcggcagcccggaacctagaggggttgacacatctcggctgagggtccgatttgtagagctcctgaagcaggttggcccattgcttggcaatggcgccgccgcatccaaggacgttgttgggattcagctctggtttgtacaatccacctggagattaagattagcatcacgttcgcagtatccaacagtaaaatgagtgtacttactaagaaagtaataagacaactcctcaatgcttcgcacacattgcaacgcagagttcatgtaacaagtattgccaaggttttgcaatcccacgatgagctgtcgacccttccgacctcgagagatgagccccctgattggatcgggagcaagtgtaggggtagatctgccactggcttgtgtgctcttcggtgtggcttttgcaacagctgctttgctagcagtatctttcttcggctgatctacagggatacctagactcttgagagttttggcagaggcttcagacacccattctccacctttggaaccgccgacctgttcctcaagaacaacacaattcgccgcggcaagaccagccatgtccaaggtcatgcgaccgttgtagttggcattgtgggtttgatccttgacaccatcaagcaacactcggtggcttccctctggaagttcgagaaaagcgttcaaatcgaaaagaagcttgtcgttggggtcagagatcagagccaatggaggagctggcgattggctgcgggagacagctggggttgccaacgctgaggcagtggtgctttgggggagctggaggattttccaaacccgaaccttggtggacatatcgacaccagtctgttctttggcatccctcaaccatttttggtaattcgtctggcgacttgccaggatcttcacagatggcttgacggtttgtctcaagatggtcggtgtagtacccacagctgggttggacagtttgaaaatggtgagaattggaggataagtctcatattcgatattttcagtatcaccgggttggttggtgttgtgagcatagcgaattatgatgggtgactggtcggcgaggccgtaccatttctggatcaagtcccaaccatgttgcggaatgattgcgaaatccagagcgtcgtgcaaaccggggcgcataggtacgaaaacttcaccagtttcgtctttgaaggtgggagtggccgggtcggtgtcgagcattatgttcatattgtcgacgggaccgacatcctccaatggtcctttgtccgtgtgatcagcatgagccgtagtacgtgcaagcaccttctttagccacgccattgacacaacaaagcccttttgtccatccttcagcggcgctgtcatcaacgcattcacctcagccacctggtcgtcgatcgtaggaatatcgtctgatttgggcgatgccggtctggaccgctcgccggccgaggatgccggcccggtcttctcattgcttgaggtggtaggataggggggttcatcgtttgtgccgtcgcatgtgcggggaataatgtatgtgcgggtgggattgaagccagtgctcacgcctccttcggggtcagagtcggtgatttcggacgccgggcgcttttcgccaggagaaggggatcgtccatgagttggaggtgtaccctctcgagtatcggagggcatgtcggaatggtcgctggagagggtgagtccggcggtcgcggtcgcgggagtgagcgagcggccaggcggacttccagactgaaactgcaggtgcgcaggcacgtagcgaggcggggacaacgacgaactctggccgcgggaggaggaagaagaagacgtgtggcgagagtgtggaggtacggagcggccgtgacgttgagcccgaaggcctggactggtgcgaggctctggggaaacctttcttctctttggggaagacgtcgtggcgatgagctgcgcacctcgtgtcgcagctcggggcaaccaggggaaaatagtagataggatcaaagtagcacccttacttccttttggtggaagtacaaggggatttggttgtgaacaagcgagttcgactggcagaaaatccgaagtttagtaatttttttttccggagcggaaacgaaaccctgggctatccacaggcgaccagcgtctgtagatgaagtgatgaaattaagataattggtgaacagaaaaaaaaaacgtaggagtacaagtaaaagaagatatgaaaagaacacgatgaaaaagatgtaggggaagaagagaggagaaagattggaaagagctgtgaaggtcttatacttgagggcggactgttcagagtagttcgctcgaggggagagacttgtgaatgggattgattgaaaagctattgtgactcacgtttctcttaacgcgattctagttctattcctattgggggttattgtcatcttaatacggtgctattgatcctattgcgaacaatggattagggcacaatgccctcattatcgcgaacgactcatcagattagactttgcaaacaagtatgagtttgttagcagaaacaacacttggaaaatattaagcttattttgcattgtctccaacctagctgctttttataagcaaagccagccatggtgagatagatatgtacaataaaaataagaaagaagagaaaaagaaagcaaaacctgtaaatcaacgctcctccacgtaaagcctgtacatggtgttgttctccgctcccgagaggattaactccacatcagctcggtagggtataaggttagacgggtcactgcgaccccatgcagcaacagcattgagatcacctttgaatcgcatggtaaggtcgagacagcagtcacagagcatcaatccacacccgcgggattcttcgtcacagtctactacctcagcgtagacattgactggttgaactgcctggcaagacccgaatgcgggctcccgacacaggctgcaccattggtaaggggaagttcgaaaaacagggccagccttgccagtctcggggtcagtcagagcttcacttgcttcctctagaagtgctgcagcatcagtccgcatttggtctttcgttgacaaaggtacaggtagtagatggagagtgtcatgggagcattgtatgattttgcatcgattccatgtacagaagacgcacatccggctctgttcttttccttcggcaatgtggccatcttgtagctcaataattgtgccgttatctaatgtgcagacctctggattgcgaggaccaaggccagtgattccatatgcaaagttgttgcaccagtggcaagggggatcttcgtcctgctcatttgcgagaaacactacaggatgagcaagttcagtccagattcgatgagtgttcgcgtactgcgaagggatggtatttgagggtgtggtgcgagtaggtgactcgagggagtcagagatatagatcggtgagccctgcctcttcggggtgttcggtgtttcatcgtctgaatcagtgattacaatcacctcatgtggcttcggtccctcagcaacggagggatgtgcgctgctgaatagaggcgaagaggtctcccaagaattgccctttgtggggttgatctctggaatctgggtctttggttggataggggaactgagttgttcactcggtttagatacctcagaaacatcgggctctggggttccatcggttgagttggagggtgctggagaataaactggagaactgcttggctcgcttggttcacttgtggcaagcagtgcaaaaggtgcgtgtctagctggtccagcaacacattcgaacccatgatttcggcatgggagacaaggttgtgaatggtcatagtcggcgtagcgatacgaacaaatctctttgttctgccctttgcaacactcgcatgtttgcttccatttgggtggggggctcacgacgcaaaagacatcatcgatttcacatattgtgcaaggataggcgaacggatcggggttagatttaagcgagcattcaaagcctagctcttggcaggcagcgcactctctcagccgaagttcgctatcaggaggcaggacatccccagtcgactccgatgcctcggcctcgacctcggttgtgtcattcgtttgtggtgattctggcagcacgtcgtcattgtaggtttgaaggccgtactgtgaattcggtgtgtctatctcgggattcacggtccagtatctgtcccagctgtcgggctcactgtgttgagacggtgtccaaggggggacataatattcactttccgtgcctgcgctcattctcgaacggaatatagaaatcggagacaagctcctggctcgcttgtctgatcgagggccgtgataatcctcatggaaaagagatagcttgcgcttggtcggtgttctcttgctggaaggttggtagtctttatctttgtcattgtcatgccatgacccaacaacagcggcacgcttgagggcacgctctcgcaagtgatatggtccagcgaggtgtgggagcatgcagaatttgctcatactatgttcaaagacctgctgtgctcgctccagtctccctggagagtatgacatggtggctacgagctgtgaagaagctgctgtcacattaataagtgtcaagatcgtaataaccgcaagcagtaaatacttacaggttgtttagattaaaccaaccaaggagttttgtcagtttggaagccacacctcggttcctcgaagaatgaaaatggaggccgtggctcaagtgatgggtttgattgacacctatcaatgcgaaggtaccttgaaacgcttggaagatgcgaaaaatatgtatgaagatggatagatggtcgaatgtccaagtgacggtagaacaaggaatgttgatataagcattcaatggctcgaactgtacgttagaaagtgaattagaagtgaagattagatgatatcgatgtaaatattgactgcagtctgtatacagtaaaataaataaaataaataaaaggaagtggaggggtctcaatagcaggaacaattgattgaattgaattatattgaattacattcatgtctcgatggggaactgtagcaacatgagacaatagcctttggatcacagaatagtaatactacaatcaatagcaattctcacattcaacgcagaccgcaaagccgacaccattccccacccattatatcaattcgcccgaggcaggattcatgtgtcacttgaaattactcgttacgctcatagagggggcgggggaaacgacacccttcgtgggtatagtgacatgggacttggtcaaaaaggtagtttgtgtaggatctatgaagatataaatgagagcagtctggataggggatgtcgtggcagtagaccaagagatcttggaaaagtcatcaggcatgttatcaattcgcgttggtgtatcgcattctcggcgtcaggctttgttatttcgagctttgctagtctgcccttttcaatgaatcaagctgtaataaatataatggcgaccagcccgaatcgaactaaagcctcaatcctattgggagtcgcttccaatgagacgaacatccccagcagtacctttcgccgtatcgtggtaaccgacgggattgtagatgatgaggagatatcgcagctgtaattcgaagacctagtaggcgaaatagattcagtgtccaaatcaagcttttctgaaagggtaaggctggcgtatatgttaacagagtctcgatcttcgtgatgttagctttggtttctctgagctttgctcgacacaccaaccacatagaatgtcatccatttggtaagaccacacccggtcagatcgcatatcggttcgactgtccgccatagtaacgataggtagattaggttggagggagtgagtggatttagttggtagagaggaagacaacagagtatgtcgtaggcctatcaagcaactactcgacgtctgcccagaatatttgaaggttgattaacgccttagatccccaggatcccaaaccattcattttgtacagttcaaaagtcaactagttatgatgttgaactttaatttatgtgaaatggatgttcgaagatgttcaaattcattgatggtcatatggaaacacgctacatggtattaacacgaaaccagaaagacaactgaagagaaggacaagcagtgaaaaacaaaacccaagtagcgcctgtaatgcagtcagtggcaatatgtgaggtcaaagcactttgattgagccacagccgttcgtgaatgcgccagggtatccatccatcaagtggagatgcaataataataaaagaacagagaagatggcagcgccgcagttatacgccccatcccatgcagacagaaaatatgtaaccaacaaggaaacttttgatagacaaaagaagaaaatcattggccactcgaggcccggaaatcatacatgcgaacttgatagtcatcaccaccagtgataaagcggctgtcgctcaagccaatgcaattgacagctgcgccgtgaccttcataggtatcttggccagtaggaacacgaggatcccagatcttgaccatgcgatccatgccaccagaggcaatccgcagagtatcagcagaaagagcccaaataccctccaggtgtccgaagaaggtacgaaggcatcttcctgtgctagtttcccacaatcggatggttgtgtctacaccgctggtgatgatatagcgcgggggttcaacgcggccttgatcctggtcaaaggaagagccgaatggtgagttcgggagagacagagacttggcctcgagaagaggggaaagtgtgctcaggatgttgtcgccgttttgagaagatgtgctgacgtggtcgttctcgcagtcggcgaggtggttctccagttcaatttctcgaggcaaagcaagaacttgctgaacggccccaatgtggttatggaagactcggatgcaagtcttggtatctaaatcccaaaggcgtgcggcaccatcgtcacaagcagtcagaaccgtgcgcgaagccgagtcgattttgacggcgttgactccctgtgggtgtggtagaacgaaagtagacttgtccttgaaattccaaattttgacagtgcgatcgacagaggcggatgcaagaagagtgcagtcaaagtgaagagcaatgacagcttcagcgtggccattgtatttggagatacattcgcctgtacgccagttccagattctgatgctgcgatccagactaccagtgatcaatttggtgtcatcaaactggaggcatcgcactccggcaacgtgacctttgagagttctcagttcttcgccagtgtctgtgtcccatatcttgaccgtagcatcataggatccagtcatcaaaatgttgtcctcgaactgcagacacatgacactgtctctgtggcccttgaagaccttgactgagcagcgcttgtgcttccaattcataccgacgacaaatcgatcccgataaacctctttccacggacggtaacgagtcttgaaataattgtcatcctcttcaggggactggggaagcgatgcacaatggcgctttgcaagaacggagacttcatcggattccatcttgcgtttgccactgactctaggttcttcgaccgtcgagcaagattcgaccattgcggcttcagtcgacccagcggcaggctcgttgttgccccagttggtagcgcgcaattcgatctcgcgcttggcttcacgcagacgcttgcgatccagaaggggaaggccccaaccacacttgttacactttcggcggatatgttgttcgcacatccggtgccaaaccacatcatcatcggcgagggctctccagcgggaagaaacttgtgctgctctgcacaaggaagccgtgtcgaggtaacgcagaattttgaaggatagctccggaggcagggcaccgaggaaatcgattcggatgagttcgcggacactggcggaaatgtaggatagttgggggaagcaggactgcgccagaattccctgcagcatgagagttcgctgcttcgccggagcagcggagaacaacgaccacacatgggaaataccgcgttgatcacattgaggaagtaagttcagctcagattgcagctgggtcatcgactgttcatcggcttggcgtctgccgcattttgagtccggttgatgccgatagcagtagctggcatttactacgtggtgctcggatggagcggaaacctgtgagcgcaaaggcgcatattgtcgtggctgatatttttcgaggaacggggccacattttgcctgcctagttcgtccagggtttgggtggtattgtcggtgtttttgcccggcggagagcggttggagtcggcgttcgcactgacccccgcgtttgcgatgaccaggctctgctgcgtggacgaagattctggtttatcggccatgatggctgatctggtctcgcgggtgtgaggggacggccgctcgggcgagtgacggtcgtgtctgatgtaccgagataagaaccagtcggtttgcgtatatccctgatctcttgggttgaattgattattttgagcacgcagaaaatatgtcaatcaatctcgcgatgtatgtccttgagaattgctcgacgatcaggatagaggggggggtcaagggctatttgattcaaccttggaagtaccctgagaggaagtattgagataagagcgatatcgagcttccaaggttggcaactaaattccacttgaatgataaagagaaagaaaaaaaaatggatcgacagaggcttttaaatcagatgattattcaatgactgagaaaattgcacaattcggatgtgtctttgatatcgccatcgatcagtccggggaattattgcgtgacaggggcagagcggcaaatacgtgatctgggcggtgaggctgcacgtgacaatgatccgcatgtcgccatctccacgccatcgcacctcaatcaatcagttcctacgcttccgacaggttgattcgctatcatttggtgcgacaggggtgaaacgggccatttgatctttgtatgatttcaggctagtcccgcagccatctcacaccgacaactcacactttgtgagacccactgtccctagctttcttggttacaactgcggatctacggagcaaaccttctgtgaaccgcttgccgtataattcacgtcttaccctgggaatcaggtctcgaccgagaaagcctcaggctgtttttcatccctttattcgcaagtcatttctgggctagagctcgtgcttcactttgggtccgccgtgtagagcacggccctggctcattgtaccgagcttccaaggtccccatgacctagctcccaggtctatggtctacaaggtagccattctctcctccagttttgaccaactctacagcagtctaatttggcaaatataggcctatattgaagtgtcctaggggcttggtggagtgaacgcgttttatcaccccatttaccttgtagctgtcaatcaatttcacccttgcccctaaggggtctaccacttcatcgactctggtcttatcttattccgaatgcgccattaacaaggttaattgattttcaaaatggcgtcatcccagtcctctttatcgtccattcgtccgcaggctggactggacgaggaccaacaatccctaccccaggttgacactttgatctcgtatctactgggtgccaaacgctcgctctcctctattagtcatgtctggcgggccaatgaaatagtcactgcgtcacactcagcactggagaagagtgttgtcctgtgctctcggacaggcttcttacgccgaggcctcaatggacaactccgtcttttatacgacgttcgaaccgaggtcgagcagatatcctaccggggtcgtgatgagttttcattggcactaaaaaacttggatgctgctgatgctcggctaagaaacacgttagatctgcttcgcgggaccatcgtccacgcgtcattcagacctggggatgaaaagcagaagtccttacatgactttgtcgatgagcgaggcgttgaagagctacatgcatctttgaaagcgtctatcgatcgcactaacacagcgcgcgctgaactggatacttccaatcgtgaattcgatgacgaacttcaagccacccgagagtcgcttcgtcactaccacacagccacaaagttggcgtcatcccggttatcaatcacatcttcctcgtcgtctgcgtccgattccggccttctcaccttgtcgtctatgccgggccagattcaatcactggaggcccatgctcaagaaatggccattcttttggaagccctggtcaggcattttgatctctgtgtcaccgctgtgaagcataccgatggcggaggagcagttgcgcgatccatcacaggggatatgccaactggtgttgatggcagcaatgacggaatgccaaacatcggggcagagatcaacgccaatctgaatgcacctcttgatccaatgactgacgccgagtatcaggagatggtggctgttttaatcaaagatgcccccgaggcggatgatgttgtcatggagatccaagatcgcatcaatgagatggaatccatatttgatcaagtgcaagctcagcgagatgccctgctgtccatctctaaagcaacgatcgacgtgcacagtcacctttcctctctcgcctcctcccgcttacctcgttatatttcccaggcacacaacttcacgcgcgtgtggcttgaagaaaatgaccgcattaacactggcctcgctgaactctctgatctgcactctttatacgatgggtttctcaatgcttatgacagcctaatgctggaagtagcacgtcggcgtcatgttcgccaacgtgtggaaaaggtgctccgagacacccggcacaaactggaccagctccacgatgaagatgccgctgctcgtgatactttccgtgctgaacacggtgactttcttccctctgatatatggcatggcgttggcttagcgccaatgcaggtgcagttcactcgtctctcgggcggccacctagatagtggtcctgtggcgcagaatgcaatcgatggacctaaagcagacgactatacaagggctgtcgaggcagaagtaacggatggcagtgccggaggagaagagatccctgacctgccaagagacctcgttgaggaagcttacgcaagggtcaaggcacgaaataaagtggcgtcccaaatgcacaccgcttgatttccgtggtgtctacgcttgcaactttttactttcatccggtacaccgagtgttgtaccattgcaattggcgtccccgacctcgctctaaattccccaccacaattgtagctaggatggaaattggatctttcacatctcaatgccgctcctaacttttacatcatggcattggcatggtgcggcttaaatgaagaaaacacaataggtctgaccttccgtcatgctcctcatatatgctccctactcgatgctcatcttatagatgcatactcttgcgttattcgcgggatgtaagcactgtttgagggcacttgtggggaattcatgacgagagcacggattggagtgatgaccaaagagagctctgataagtttttacccacccgatttggtttctttttctttcgaatcagttgtcaatacttcgtatatagttattatgaatagtctactcttaatgaaagttttcaggttcagtcttgaggagcttggatcaaatatttatgttttcccaattctatcaagtatagaccaaggtatcaaatgcccaatgctccatccatatatgcatttcatcatcagatcatgccaagcggtagatgacacagagtgcaaacattcgcaactcgtgcacatgcaaagaaagataaggtcagaaagctacgagagcttatttcttctttctacaagagccagaaacaagctttttcttcatgtgcttcggcatcttgtttgcccgctgctcacgcttctcctccttgacctttgccttgtggtcgcgcttggagtctttgtcttcgaaacgcttgcctcgtggcggcttcggcgcgaacggatctatttcctcgtcatctgagtcggatccggagacggagacgccgccgcttgcatcagacgcatcatcttcgacagcatcagtagcagaggccttctttttttcgccggccaagaggtctccgtaaatcaggtcagcaccttcgccatcgcggatgcgttcggcgtcacgttcgacatcatacacttgctctagggtctgaggaatatattgttgacggaagacggcggtgtcaacatcctcggcctcctgctgctcatcatcaccctcctcacgggcaacgaggagcttttcgatggcagtcgtcatctcttcattgccagcggtgccatccaatggtccttctggggagatgatgaactggaacacagtccgctcgggaagagtctggatgttctttcggcggaagaagtcgctgacgttcttgatatccatgcgcaggaattccagactgcgcgggtggtcgtgctcaacactttgactgacatcgatgatatacaggcgttccttatggtacagaatgttgtactcactcagatcagcgtgcaccagacgacatgtctggtacataacgcgcatatagcccaacaattcaatatacagtgcgcgccagcgagtttcaggttcagggatattgaagtccacatccttgaggcgcggtgcgcctagaccttttgagctaccgatgaatcccataacaaggacgtgcagacgaaggaagataggctcggggcagggaataccagaggcatagattcttcgcaggtttcgcatctctttctcggcccaaagtttgaccatggcgcggttgttgctcttgttgtaaccctggcggaaacggaactctccggtgacgtacttatcgcgatccttgaataccaagatacttgtcttgtagaccttgatcgcacggtgtagtggggcagcatccgggtcttcctgcgagacggacatggcatggtagacattcgcttcctttccggtcgacaaacatccgtgaatttctgagacgaggcctcggttgatcatttgcagcagaagcatccgcgtacggggatccaacacttgttctgatgtggctcggtctgccttatctgctccacccttgtcgctgcgccccgaaaagccggcctgttggtcgtccagcttgatcttcgcagcatgacgagtgagagacttgacctggtcatcgacatatgcggatgtattcacggtaggcttctgggtgttcgtcttggggtatgtccatctcggcacgttcgagtcgccagcgaggtcgttgattctgcgttggcgattgtatgctttggtaagatcggtgttgtcagaagacagaatatcttcacgatccaattcatcgtcaaaaatgtcgtcgtagtactcgtcgtcctcttcctcttcctcttcctcctgcccatcgggcggatattgccccgcctcggcggagtctgcggtatcagggttcacgtagcctttgttgggcacgtaggtatgcgacggcgcgaggccatcggcaattccagctgccgcggcagtattctcattcgaagccattctggatctccaaagttgagaatgtagagatttgaaatatgtcccgcgggtccccaaggttttttttttttctgtgctcaaattagggtcaccgcccggcagaaccccgcgcccaacgagacgcgctaatttcgttcctcgcgtatgtaggcaatctccttggttttgcaacgaatcacgatacccctcggcctttgtctgttcattactagagagatctgctggccttgatctttgtgatatactccatccttaattttgctcttgcgccaggcgcgttatgctgagagtcctctgattgatcctcgcgtcgcgcgtttcttctcaagatgtatgtcaagcagatcattatccaaggcttcaagaggtattttcccaccccatccgcaatctctatgacgttatgaaatttatattgacctcgtaccaaattcagctacaaagatcagacggtcattgagccattctcccccaaacacaacgtcattgtcggccgcaatggttccgggaaaagtaacttcttcgcggccattcgctttgtcctcagcgatgcctatacccatcttggcagagaggaacgccaagctcttttgcacgtatgtatactggtgttgctccaatctacataggttgaccccaagcaggaaggttccggttcggctgtgatgtccgcctacgttgagattatattcgacaactccgacgatcgattccccaccggcaagccagaggtcgtcctgcgtcgtaccattggtatcaagaaggatgaatacaccctcgaccgcaagaatgccaccaagaacgatgttatgaacctgctcgagtcggctggtttctctcgctccaacccttactacattgttccccaaggccgagtgactgcgttgaccaacatgaaagactccgagcggctgattctgctgaaggaggtcgccggtactcaggtctacgaagcccgtcgttcagagtctttgaaaattatgagtgagaccaacagcaagcgtgccaagattgacgaactcctcgattacattaacgaacgtcttgccgaactcgaagaagaaaaggatgagcttcggagctatcaggagaaagacaaggagcgccgctgtctagagtacaccatttactccctcgaacaacaggagatcggcaaggttctcaatgagattgaagagcgacgacagaacggcgttgaggatgccgacaataatcgtgaccaatttgttgagggcgagaaggccattgctgagatcgatgttgagatcgctgagtgccggcaacagattgagttcctgaaggttgacaaggctcaactagaggacgaacggcgtgaagcatcgaaaactctagctcagaatgaactgcaggccaagtctcttgctgacaaccaggctgctgcacaagcattgaaatcccgctacgactccgacctcagctctgttcagaccgctatcagtgagcgtgaagccgaacatcgcgaaattcttcctagattcaatgccttgaaggatcaggaagagacagttagatcacagttgacggatgccgagacatcgcgtcagcgtttgtatgcaaagcagggtagaaactcgcgattcaagaacaaatctgagcgtgacaagtggcttaacatggaagtccgcgagagccataattccatcagcactgtccagggtgtgatctctcagacacaagaagatatccgagaccttgaaagcgagattgccgctttggagcctgaaactgaacgcttgcgccagcaaatcgatggacgcggcgacacaatgcatactgtggatcaacaagtccaagatgccaaggatgaaagagaccgtctcatggaccaaagaaagtaagctcgcttgaaccactcataggctataaccagacattaatgattatgtagggaactctggagagaagaagcgaagcttgactccgtgctttcgaatgcatcccaggaggtggaccgtgctgagcgcaatctctcgcatatgatggataacaacaccagtcgtggaattgccgcagtgcgtcgaatcacgcgtcagcataacctcgaaggtgtttatggtactcttgccgagcttttcgatgtcaatgatagatatcggaccgccgtagaagttactgccggccagagtttattccactacgttgttgacacagatgaaactgctacaaccgttctcgagatcctacaaaaggaaaaggctggtcgtgtgacattcatgcctctgaacagacttcgtactaggccgatgaacatgcctcgtgctagcgacacaatacccatgatcgataagttgcagtacgacccggcatatgacagagccttccagcatgtgttcggcaagactatcatttgccccaacctacaggttgcgtcgcagtacgcacgaagccacggtgtcaatgctatcactccagagggtgatcgatcagacaagcgtggtgccttgactggtggataccacgactctcgtcagtcacgactagacgctgtcaagattctagctaagtggcgagatgagtatgagaccaagagaaatcgcggtaccgaaatccggaaagagttagaaaaacttgaccagctgatcactaaggctgtcggtgaactgcaaaaacttgagcaacaaagacatcaggtccagaacagcagtggacctttacgacacgagttgagggccaaacgtgatctcctccaaaacaagaccgatactcttgatgccaagcgacgcgctcttcgaaatgttgagtctaaccttgcggccctgaacgatcaagtcaatgcgttccagactgaactgtcttctcctttccagaaagctctcaccagcgaggaggaagctcaactagagactttaagcagcacagtgcaagatttgcgccgccaataccaagagcttgccggtcagcgaagcgagctcgaggcacgcaagtcagtgttggaagttgagcttcgagagaatctcaaccctcgtcttgaccagttactcaacagagacattgacatcgccgacgaggaagttcaaggcaacttgaaagagacacagcgtgaagtgaagcgcattggccagacgttggaaaaactcaacgcccgactcaaggaagttgacacctcaattgaggaaggcacttctcgggtgatagatctgcagcagcgtaatgcggagacccgacgagaaattgaagacctcgctcggtctattgaaaaacaccagcgacgtatggagaagagcatgcaaaagaaggcagcactcactaagcaaggtgccgaatgtgcggctaacatccgttccctcggagttcttccggatgaagctttcaccaaataccaaaataccgactccaacactgttgtcaagaagctccataagaccaacgaggctcttaagaaatattcccatgtcaataagaaggcgtttgaacagtataacagttttaccaagcagcgtgagactcttactacgcgtcgttctgagctagatgcatcccaaaaatccatcgatgaccttatttctgttcttgatcaacgcaaggatgaggccattgaaagaactttcaagcaggtctcacgcgagttccacaatgtgtttgagaaacttgttcctgccggtcgtggtcgtcttatcattcaaaggaaaacagaccatgctccccgagtcggtgaagatgttgactcagatgacgaggcagctcggcagagcgtcgaaaactatgtcggtgttggcatcagtgtgagcttcaatagcaagcacgatgatcaacaacgtattcagcagctgagtggtggacaaaaaagtgagcatttccagtccgaatgcgtattttgttttgctgttgctaaccaatctcccatgtaggtctttgcgctctcgccctcgttttcgccatccaggcttgcgaccccgcaccattctacctattcgatgagatcgatgccaacctggatgctcagtaccgaacagccgttgcacagatgctcaagtccatctcggattcgacaaatgggcagtttatctgtactaccttccgacctgaaatgctgcacgtcgcggagaagtgctatggtgtaagcttcaggcaaaaggccagtactatcgatgttgtctcccgcgaggaggctctgaagttcgtggaggagcaaaagacttgatgtatttcccaggcgtgctctttgtatattgtaatcaacatttgcttcgatggactagctggctggcgtattctgataccgaactctttttttattcttcaatttcaaatttttattcttgcggcgtagttctttgtatatttctcaacgaattggatttccttgaccgacggacttgaaaaagaagcgaagcttgactgcaggcaaaatcggatatgtatgtggactggcactgtataaatgcgacaaaacgatttcatttcataatttttacagcgttttcacaattcaagctagctcacactcaatcaaactctccacgccccgctgcgcagtccaaatcttgacaatcttcagcccagcagactccaacaacgcatgccattggtgttctgtacgctcaccagatccaatctccatcataatcaaatccagacttgtggtttcccaataagcccccgtgtctggaatcacattctcgttcaccaacaccttgctataaccaggcttcatagcagctactgtattagcgaggatattgcgacaaagctcatcaggccagtcatggagaacagaatgcaagtagtacgagcgggctcctatgcgggcagaatgttagtatatgccagcaatcgatgggctcaatatttcaatacgcatggtcaggggaaagtcttccgtttttgtacctttgactggttgctcagtaaagaaatcatgagcagtaacttcaatcgtggggtgtagatccttaaccgaaaccaccacctcaggaagatcctgaagcaccagacgaccggggaggccaggccatttccgacggaaatcggatagatcatggccgaaactgcctccgagatcaacgagcaggacatcgtcctcgccaatcgtgacgccgtccacaagccgctcttggaccgggtagaagccgggatccatccagcgtactcggccttgcccgtagactgacatgtgattattaaactgctttgccgtgagcggttcttgctgcaaatgtccgaagaagcctatgtctgtttcatagcccatctggaatgctgtatctgtcggacttgtgggattttggtagttgtttttcttgaggaaggtcggtagagccataatacctttggtgaaacggcgtgtcctgaacttgttagtcggggttgagggtatggagctctgactatcaacctacatgagcggaaatgcatcgctatatctttcaacaataaggacttttgagaagccagtcgggctgtactcgttgtagccggtctcggttattgttcccatcgcagcgagatgcttcatcagtcgccctacacgatttgtcagatattgggttttgctggcgtacaaacaaactactgaccgagcaagattggatccacactggttgcctcagcaagctcattgacagtcttcggtctgtcatctgttccaagagcagagaatagatgtatgtcaacagcggtctctatggctgcataactcgtagactaagcaaatgcaatacccatcagtcgaaacagtttcaaacttgtcttgggccacattatggtagttacaacacacctcagaccagcagtgtcgaatgattgcctctcggggggtttccaatgcataagccaacgattggacggcttctagtagcttaagccgtgctttggggtcctgggcaaggaggtctttgccatgactcgcaaccgtttcaaggagatcaggcacggtatctggcaggtttgagatgagagcaagaccttctacatcggttgcattggacgccatgatggactgtgtttgctgcgatgtatatgtagaagaggaagtgggagtcaagaagtatctcaacaacacaatctcatgttactaaattctagttgccaacatatattgtctagtaaaattgccaaccccctgacaggatcactatccctgtctcctagtacattagtacatacattagtgtcatattttgttccaggttaagcgaccttaagccacaattggttggttattgcttctactgagctaaactctatgacccatgcagtcattatctaaccgagtgaattctccaggactagagctattaacagctccgcataatgcaaggatattggatccacgaacaatacacgcattgactggttcatatgaatccgacaggaaatcaaaggtacataatacgagaattactttccagggttctacttagcgggaccggggcttttcggattcaaaggtactatcttattgtgcgtacttttgtacttagtactataataaacgaggcaatatatggagtgcaatttgtgaaaacacgctaaggccgtactgtctgggggccaaaactatggacttgttgttaagccaatcgcgatcctagcgctttaggaccctgatttttctagggaagcgattggtcaactcagctaaacatgacgctctatgatcccgtaggtacgtgctataacaatagtacctaagtacaaattcttttagaaataatatgtcctcggctggccatttctccacatttctttttggtcctcttaaggccagagaaaaccgtgattctcctataaggaacacatcggtcgctactctctatcatggcaaccatggacgctgaatacataaaccagacaaagggtccacgtattctaggggtcttctgggcttttttcagtgtaagcgtggtgatggtatccttacgattttatatccgagtccgagtgttgaggaacattggactcgatgattatattgtcctggtggcaatggtatgtaccttctagttgattttgagatacgccagataccaattacataggttatggtcaccagttatacaattctcaccacggtgaacgtcgttttaggctacggaagccatacctctgtcttgatggaaaaaggcgggattgacttgatcgaacgtattctagtcattaattatgcaaactttgcactaggaatcatgtctttcacaactccaaaactggcaatcgctgctctcctgaatcgcatcatgaatcccagccgcttgagccgagtatggctatggatattgacagcctcggtgttcgtgacatccaccatctgcatcatcgttctattcaccatgtgtgatcctccccgggctttatggaaggtacatctcatgagtgagggggcaaaatgtcgttcgaccaagattttggtgggctatgcaatcttcactggaggtatgtttctggactgtatgtttttcgcaaaccagcaactaaacattctcagttctgtcggcgggggtcgatctatatcttgcagtttacccgactgtggtattgctacaacttcaaatgtcgattcagaaaaaattggccctgtgtgcggctttggggttgggcgccgtgtaggttgattgatgttattgtctggagaaagtagctgatcgtctacacagagcctgtgcaatggctattattaagtgtctacagctaccaggtctatataatacggaagactcaacatgtaagttgctttcagtgcataacatgagatatatatcactgacacggcataatagatgcaacagcagatcttgttatatggacgaggtatgttttaagtcctgtttttctccggccttgacacaaaaacttatatcggcgtctcatctatcagcgtcgagtccaacatcatcataatggcctcctgcatcccaaccttgggtccgatctatgaaatgattcgaggcagacgttcctggagctcacacgcgcgatacgagagcggaaagttgcgctcttacacggatagacccacgaagaaatcggcaagcaatactcgcgaggacgaggatatcctcatgaccacggatattagggttacaaggagcggcagccaagaaagcattttgaactcggatcaactccggaaagaggcctatgtggcaggtaagattcatcgcacggatcaggtaaagatcgagtacgagacaagacctcaaggtgagaatggacctgcaccttcatggtagcatggtttgtctactagtgtactactacctcttatgatcattattgcgggttgactaagttgtaacctttcaactctacctaattccatcttttcttcccgagcgatgttgtcgggagcaaaatgcttctaatctatcaacaatcctaccagcaacttcactcgtttacccattcgaatatgatatcctcggggacatcacggaccaaaatatggacatgctccaaggcccgcacactctgtaggccaacccaattcttaaaccatagcacatgggagtcagggtccgagaagttttggggatccttagccaatcggtgcacgaaagtcttttgaacaaaaccgttgatgattgcacgagattcatcggtcaaatggccctcatcggattgtacggggataggagtgcgtagccacacgacaagatgtgagattccgggggtgaggccatagggccagtcattgcggaggatcttgtagtcctcgggatcggcaaagggacgcgggttcttgaaggtcgctgtcccgctttgctggataaccgcggagccagtgccgctggcagtgttcagcggcaaatcccactttaatcgccgctggcaaatataattcatgatcgtgccatactggactttagtctcttgtgtccaggccaggtaccggcggagatcggaaggcttccgcttgagtgcgccgaggtcatttcgtgctattacggcatatggcatgaggggaattgttcgagcacaagtgagaaatatacttaccgatgatgctttttaggtcttcccagtcgtggtatacgtactcctcgtcggtcatggccaggagcttgtggtccaattccgttagattaaaggcagggacttctggtacttcgggcattttggaaatgatcaaaagaagaaatcaaaagcgatgtcaagcaaggcaatagcctcagtaaatcgaataactccagcaaatccagtaagtccaagtccaagtaagtccaagtaaacacggaaagccggggaaatcgtaaccccaaagggtgggaaattccgttgggcggagccccctcatctcttttttatcttctctctcgccttttcttcttctctttctgcttctatcgcaactgtcttattgaaatacagtgtccgagttctgtcataatgaggtgagtcgatcttctcctgtaatatcgaacaatggctgattcctccaagcctcgccaacatcggcacggccctcgtgccctcggccctgctcatcgcgagtgtttacgccattaagcccgagtttatcgcctatgcaattgctgtcgctggagttctggctggttacttggttttcagcaccagtagtgcgtgcatctttttatgtccaaatactggagtgaggaattaagctgacccccgatgtcgcagagcctcgcaaggtcttgaaccccaccgagttccagaacttcgtcctcaaggagaagaacgagatctctcacaatgtcgctatctaccgttttgccctcccccgttccaccgatatcctcggcctccccatcggtcagcacatctctctcgccgccactatcgccggtcagcccaaggaggttgtccgctcttacacccctatctcctccgacaatgaggccggctacttcgatctgctcgtcaaggcttacccccagggtaacatctccaagtatcttaccgaactgaagattggcgacaacatgaaggtccgtggccccaagggcgccatggtgtacacccccaacatgtgccgccacattggtatgatctccggcggcactggtattacccctatgctgcaggtcatcaaggccatcatccgcaaccgtccccgcaacggtggcaacgacaccaccaaggttgacctcatcttcgccaacgtcaaccccgaggacatcttgctcaaggaccagctcgaggagttggagaaggaggatgatggattccgcatctactacgttcttaacaacccgcccgagggctggactggcggtgttggctttgtgactcccgacatgatcaaggtaagtttgcgtgctgtgctcgcctgtgccacctcggtattaattaagctttattataggagcgcctgcccgcccccgctgccgatgttaagattttgctctgcggtccccctcccatggtcagcgcgatgaagaaggccaccgaggctcttggatacaccaaggcgcgccccgtcagcaagctggaggaccaggtcttctgcttctaagggattcgctgcgaatcaaagaaaagttgctgttttcgaacttgactctgcctttaataattgtgaatcttctacagaatgttagcgggcccgccgtgaagcatttttctttttttgatgtataatctctggtgtggttatatatgtgaatagacctcggcctacaagggattaaatgagcgcaccggggatcgaatgcgtgagatatccgcctaaaccttggtattataccatgttcttaattgtctaaaagtcaagactccagccaaagcaatggctctaaaaattcccatgagcgatgtccccttcaaacccctctgcgctgcctctgaatccatgaaagtcctaggattcgctcattttcatcgccatcagcttgtcctcgggctgggatttgcctggtggctttcccaaatccgtgaaaaggtccttatgccggcaccggggacaacgactctcctcaagttcacttggggagagtactatggatataggcagcgggggtagatcatatacacaaggctcgcacatgcggcaaaacatgcagtatagtccatatcgacatctctctccacaacaagcgcagggggcttcctcatggccgtctactttaatgaagtcacctggtcgatatatcctgttctcgcagccgcaatcgaagcaaaatcgacggtcactctcggcgtggccttttccgcgcttggctcgtagttgattatcggcaaacgcttttcggggtcgaagtttcagacatatcttgcacgaaaagaggtggttatatctggaataattagtaactaggagataggttgatcgacatagcaagactttgtcatgctaggaagcagctacattggccattgctctatttcaagtagaaacgatagtttctgttcttctgtcgtaggcggctttgtaggaacaatagccctgaaacgttggtttgtttggaaaagtgcaacagatgaggggtatcaagagattttatgatatgtaattggagctcggtcggcaaatccaatatagtaatactagtcatactgctcatggcgattagatcagatctcaaattgcatttaccttagagaagaagaatcgacggggcgtacagcctaaatcgacgacagagcgaaaacggctctattaattatagatcacgtgacttctccatatactcccgataattattccatactccttatataaattgatattttccagagcatatgcattcttcacatagtaccctcgtctctatctcgaatatggtgctaccattagtgagagaggtaatctactctttgaaaggtttaagatagatgcatactagaggtaaatgcagacagaggaagaggtcataatattatatacaggccaagaccataattgtacaggcggtgattagagcggtgagccaaaaactagtttatttagtttatcgtagtggtccgattcgtctgttgagaaaagaatgacgtggatgatttttcaaggcctagcgatacgaatggacatactttacttagcaacgtcctggtacagtacctattgagatgtgttctatctagatatgcgctcttacatctagctataaagttgatagtattttcaatttgtcccaaataacaaatgattcaaatcattaattgaaaactattcccgattgccactaggtgcgggcgaatgagagcgggaagatccaaatgataccctatcgccatcgcgaggttgagttgtactccgagtcatacccgaagctgtgattgcacgtgtataagcatcgtccctgtcataagacgatctgttgattgctgtgacaacatatatatcgtcagaactggtattcacgcttcgcaagtccataaccttaccttcatctaaaccccgagaattgttggcatcagacacttcttccacgtcttgactgcgctttttgtcttcattgcgatccagcccttgtagagctcgaactccgtacgatgccgtttcgctcatgtaccatacagctaacgcccgtgtcagtatacggatatgaatgccagatatcgtagtccatcaagaccgagacaggcctgcaagtagatatattgacttactcttgaatggcagcatcgcaatctttccacaagtaaccgcagacccaaagcccacagttctcgcgactttcatcgccgtctcggttcgcgttttaggttgcgcgactttctggcccatcggcacgggtgcgtcattctcagtctagacaatcaataatctggtcagttctgggtgtccacttgagctaagccgcattgcgcttgttacctcgcgtttcctgtgcgcatctgcgatatgcgagacagtaggtttgatgatggctttgatcagacttatggatacgccctttgcgtcgacaaggaacgtagtcttgactttttcttcgacgagctcgggggttttatcgcgtcttgtgtgtgctgggtactcatccctgtttaatgtcattagctcaagttcccaagttcaaaccggactggccgagtcaaaaaaggacctacaattctgccgtggagccgcctcctcttgtcgaaatgacgaccacatcagcctcgaccttgctgctaaacgatggttgtaattgcatgcgatggatcacaggctctgtgtcagcatcactgcattgaaccttctcccattttaattggcgatagaatgattggacggcgtttgcagtgccgttctctccctggatcttctggcctaaccttgaagcaactcgttttacctctggtcgtaggcaatactggaacgcctcgaaaaagacttcgctgctgagcgcttgctcgcgaagtggagatggaccgagtcctgcgttgtagatggtcgttgcccagaagggttggctaagaattatcagcgtgaaaccttacaatttaggctcatgcgtggcccgatcaaagaaattcaaaaatggaaggcttactcgcaaagaagtggtagtgagatcattggtttcccgtttttagcaccctgtacgaaggtgtatagcggccaacagtcggatgcctgattttaatggttttatcgcctaattgggactagctcttaccagttttagaccgcctttgacaccgctcaataccatcttttgtaagtacacatcgaagagacgaaactgttaccatggggtaattcaaatgccttctacctattttaattctcaaaactacattcaaatattcgccacgccggagccagaggatacggagagtttgaagtttatacggtcggtaggaatggggactttgtgttgaaatccaggcttggctttccaaccgttttgggccttggtgtcagttgcgctattagcttttctccgggaaagtgcgggactacggcgggtatgaatggctttaaatacaggagattcatatagttggagggccttaacgcctaggatcgatgagaaatagtattttggggggggggggggggggtatgcaaactttctttttccaatttttaaccnnnnnnnnnnnnnnnnnnnnnnnnnnnnnnnnnnnnnnnnnnnnnnnnnnnnnnnnnnnnagatgggggggggggggggggggggggggggggggggtatgaatagcttcatgtttcaactttcaagctgttctcaatttggtactaggagatctgtcatagtaattcaggtattttaatttcctgccggtctaaaattggtaagagctagtcctaattaggctataaaaccattaaaatcaggcatccggctgttggccgctatacaccttcgtacaccctgcttgaccgttgggatgtcaccacttgtgaataagatcgatactcggcggatgagccattctttgacttttgagaattcttcaattagcttcgttgttttcataagtgttgatcttatgcggaaattacactcaccatttgggtcattctctaacaagaaaatcttcggcaattcagaaacatcaattgcttctcggaacccactcggcagaagcaaatatatcccatgcttctgtgaagcttccacgagatattgaacgaataactcagggtttttcagttgggtgatgtccagagcaacgaagacaggctcaagtgcggaatcgaggaaattctttagcgcctttgacggggtataagaagatgggctttcgattgaagtatagccggaaatgtctaagaactcatgttagaaaagatctcggtcgagtccgagactggttttgcgcataccaatggtgtcatcccagtcctctggtttggggagcaattccgatgaccatagataggtatgagggatctttgattctcttaaaatttcagccccgctagatagaggcagctgcggtaggtctaggactgcttttcggaaatgatcgacgacattgcacaccctagagtactgtcaatgactgtctttatacggctggataattcgagggtcagggctatacttactcattccacgccgactcccagaccagtagataggaaatatagttctgcaactggtaatcaatctcactccccgtcgcgatctgtgctagcgggtgtacgaatcgtctcgtcggtgtccaggggctgttggacattatatgaagcgggatggataaccgctccgcacaatgaacatgagcgtgtgcaagaggtgttgcgatgatggcgttggtgacaaagggcttgctttcgtgcgagccggggtagatgcaggcattccaacattccttgagtgtgtttagcaagacctttttgtttttcaagacctggtgcctgtcaaggccatttgaatcaggcatgaggccagaatcccttgcctgttatgtatgagttgtttgtttactgcagtaccggtgaagatatgaagaggaacttaccgcgataggatgctctgggtcgttgctgatggagaaaaattccaatccggccctgtgggcgagcgattggaaaattgagtgtgaagcgactcggactctgtggccctgtcggtggagttcctggccaaccagtataatagatttgatctcctctgtcatgaccattagcatgggtaggagtgccctcggcgatgttcaattcttacctctgcttcctacaagcatcaaaacaatatccagtggaatttcatgagttccagatacggtcttcacatcatcagtgtttatgggaagtaaatctgagctggagctgttggcttgaatttgtattatccgtggtcgttgggcaggcaataaaaattgttcgattagcatagacgtgcgattcccggcacttaaatctatgctaaagcgaccgatgtctatatcgttgaaattagttagcacaagaattttcaaatgtgtacttctttctatcttgagtaccttcgatcaggattgattcccgcctttcatcccgggtggttgacggtgaaagtagtaggtcttcggagaatagagagctgtaggtgggcggtggtagctcattagcaattgaatggtcgtccatttggctgccattaacaatatcttcttctctcagctcttgtttggagaatattttgctgaatcttgggcggagaacttcagcggaaagatcgcattattaaagataccccagtggcgtatggctaggcaacttcttttttttcttccccttgaaactactattaaggttcttgaccgttgatgatccttctagaaccaatccactatcgtgttgtctagggtttctatagtcggatcgaatacgaacccgaacccgagacccacatcttgtcaaggttgctactatgcatagggtgtgaatattcgtattcggcttcggatcatatcgaaacatacatttggtctttcacagtaggagtttatgctatctttgtcaaagttgcttcaccatataggatcatcgtctctatttccaagttcttctctttggtacctttataatatcatccggtccatataagaattctccaatcatcaacggaacagtccgagcgaacaatgcatttctgggggatctctcttacctagaaactgactcggtcttttcttttcatactatgatattggtatttttagactaggctgttttgaatctgcttattctatataccctatgccccttctccccgcataagctccatatcgtcaagtttgcgatgtcccccagagataatttgacttgggtggaaaaccaggaaaacgatcgtaaccgcaagcataagagcgccatcaaagatatacgcaaagtactcatgactttgcaaaaagccagtcgacccttgaatatactcgatgactcggtagagacaacgggtcataatcaaagcgcttgcaaaatagagcacaagcatataccggtgccagttcaccgaagtagccattgctgcggaagtggggtagttcgccatccgcttatgaaagatgaccgagacgacaacgaagaagccaaagaagatgatttggacgatcaggccgacgataatcacatcttcgccgagtttcaacttgctagctgacttagcactagacatgattgcgcctcctatggatagaagttaataattgatcccttgcgtgagagcgatatagcacttcttacctccactttgaatgaaaaatgacagcacatcgcctaggacaaagatcttggtcaatcttgttgcgcgaatgagcgatctagaatcaccatccaccagacgtatgatccgaccaagaatcatgtagatcgatgccgcaaacagagaaggagcaagtagaataaagagactttgcaaggcgtatggcattgtcgagtaatttggggcttcatgggcgttgactgctcgtgccgcatatccaatggcttcaaataaaccgccaacgacgaaggtgatgaagaatattgtcttatgcttccaaacgaagaagatgtgcccgcagattaggaagacaaaaagaagcaagaaaataattgcggctgccagcgagggtgtgtagttgtagagactgtaaccggacattgtgaatgacaaggatggagttgcgatgattcaaaggagggaaagtaacgagtgatttagtgaaaaaatcttgggagaaacgctcaatggatgaaacaactgatctggaaatcgaatacttatttgtatgctgagagaaatatcgacatataatcaatacactatggagttatttatggacattcaaacactgggggataatgagcggagaatattttctctcccaggcagctgcaataaaatgctaattatggagcttcagagcttgtcttcacaagcatcaggctatatccaactgttgtagttcggcagaggaaactggctccgaaaagtccgaatacggacacgaaggcccactttccacatgagtacgaaatataatagtatttttttctacttctatgtttatgcggatcaaactgataatttgaactcatgataaacaatagagtaagctgttgcgaaccgttagaatagttgtatgttcgtgggatagttgattgtatgcctcacaacaattgcaaggtgattgtcattaactagaatccacatttcccagagatctagtgtaattgggactcgcatgacaatcctggaaagcctctagaggtgttaggcatccgtattatcttcttaaacatcatcgttccaaggaaaaaaagcggcgcaatgcgaaacgctccatattgcttgattcttgattagtatttttcacgagtactcaagaaactttgaaaccatctagttagaggtatcctgatgccaggtttcaaaatttgcctccaatattcctataatggtcagcaattctgctatcatcgttatcgtgctcgtgtgtgccctcacagccgtctcactcgcggcgggtatattcactgtcgttaaccctgccacccatatgctatcggcaccgaacccagagcaacaaaagtatatgcgagaagtcagaattaggcaatttcgtcagctgcgacgagaaagaaatttcagacctgagatttttccaaggtaagtactagctcctaccacactctgattaatcttactctaacaatttggcagagcaatagtgaacattgaaagccatccaagcctggaaagtacgaacgagccgtgaatcacgagcttttttattgcaattgaacgagtcaaggaggtttataatggggtctacgacaatgaagtgtacttaaagagataatcttgatacgatcagagaacaatcggtatttgagacttgcggacgtaagtacgttttacttgctaggaagaggctactatctatataccttgcattgctagtctgctatcaactcttttcttggtaaggctgagtgcatggcgagttttcgtttctagtagtccaatggcttcttcaaatctactcatgccacactagttctaaaactgcgagaaaatactcttcaacactttatttagtgttggcaattccccgttctttattcttcttccaatattgttgttcgagatcacgtgacccctacgtacgcaatatttgtcccagcaatagctagtttctcttttcctctctacgcaaactcgatattttccaagagtgtctacattatttgtgtggtattctcgtctgtatctctaactttggctacaaggttaaagacaaaactcgagcatggccggtggtttccttccataccacgaacctggaagtatgtacacaagcatataccgattgatctctgctcatttcctcactaataaattactgcagctgtcgacatcctcattatcgtttctttcttctttttcctttcccttgcaaaatgggtctccgcgacagtgatccaggccggaattataggtcagatcgccgtcggcatcatttacggagtaccattggccaatatccttaaatatcactggcaagagacttttgttactctcggatatgtcggtctcattttgatcattttcgaaggtaggcggaaatttccttcttgcctggcttcttggcctcttggcctcttggcttcttggatactgacgtcatctatcctaggcggtcttggcgcccgtgtggacatgctcaagcagaacttcactttgagtatgataagcgccgcaactggagttttatttcctattggactctcataccttttgctatatcttggttttggatatggtttgttttatttatctcaattcctacggtcaacagctaacatggactaggtgcggtcgagaccttcatcatcggcgcatctctttccgccacttcactcggtaagctatctttcctcgaaattcggttgactatgtttcaattgctgataaatattagggaccacctttgctgtgatcagctctgcgtccgactcagtcaacctcgccgagactcgagtagggtcagttctagtaagcgcggctgttatcgacgatgttgtaggacttgttatgttaaggtatgttacttatctgaacttgcataaggtgcgtagtctatttttttttttttagctaactgtctacccagtgtggtcgcggatttgggcaaactatcaggaggtgatagtgtcaacctgggctggctcattgggcgtcccatagtggcatcgataggcatggctgccgtaacacccatcgtcaccaaatgggtgtttgcgccatttttccgaaagttcgttgaataccgctttgcacgctacgaccatatctccaacatcatcctcatgatccttgttctttcggcttttattgccatcgctggctttactggaacttccgtcttatttggtgctttcctggccggtgtatttcttacatacataccgagcaagcaccccgagggaccgtttgttgtcctgagccgcgaggaaggcgagcgcgacgaagataaaagccctactttcattcatacctttgagaaatacctgttaggaccccagcagtacttgatggaaccattgttcttctcaagtatcggattcgcgattccattcttggagctgtggaccggggaacgcatctggaaaggaattgtttacaccctcttgatggcttttgcaaaggtatagatacccttaaaggtcgttcctcggcaatcaaactaacatagttatctagtgtgttgtcggaatctgggtccccatatggcaactcgctttggggggtaaatctgacacaaagctacacgaagagcaggaaatacaggggcaacagaagatcgagggcaacaatcccagcgatgaaggccaaagcgaccaagagaaggggaagacgtggaaacggacctggctggccacaatacttttaggatctgcgatggtagcacgcggtgaaattgggcttctgataatcgaaaccggatacaacgaaacttcatacgttagtaatgaaggcttctacaccggcatctgggcgattcttttgaataccatcattgggccagttggcgtcggtctcctggttcgattctacgcgcacgagctcaaggggggtgattggggagtgcagcgtactccggctatctcgggctatggttctagtgaacatggggcggtatagcagcacgtaaaatgttcacatgctatcgaggaagctatataaccgtttttgtgtgaagattacacgccaggagttagctcggtgatccggaccaatagcggaaaacggcccgcctgggaaaaggcaagcaaaacaagaaatctcctgttagggagaacggggaactttatagaaccacggccgggcaagcactgggactggtggcgctaaaccgaaagcaaccgtcgtaaccgtccgatatggtgtatgcagtatcgtcggcgacaacgggcaattcaagccaatttccttctcgtcttggtgtggagaggagccagagcttattcctttgttattacataaatcttttgttttgattagggtaccgtaaacgtttttgagttttgtttaattcggttctcttagtgttgaacgcagcctgttttaaccattccagggttgtggtaactcttttggcaaacctgattctgtgagtcactagacctattggttttcccatcaatgcgggggaagtccaaacggtaaactctagctgaagcctgaacgttgcattatccagtaggaatgtccatccccacgtcatcgttcggcgctcctagaacagaactcgtctttctttaattaaaccaactcgccggtacctggttgtttggtacattttcaacccttcgtctaattctatgtcggcatttgtaccacgttgcgaaatggttggttggctcttacatctattcatccttcatctacgatgattaccctcctttcacctcatttcgtacttccagcggtcagcgaggatgacatggtgattgcttcactcgcatggggcttcacgattggctttgggtggctcactacctggacagcggtgaagcagactctgcacatatataagagacatggtcgccatatcttccataatgcctatgtatggatgatatggctcgagattctagtttgtctcatcttcagtgtgctctgctggttatacctgaggggtacgattccaccaaggtgagctcgaaccaatccgagattacggaaaaggagtcagtgctgaccaaattgtcagctttgccttctatttctgcattggtatgtccacttggggctcttattatcttatcagaatgcttattttgcgaagttactacatgggccctgcaagtaaatggctctatgcaaccttaggaaactgattaatgatgcgaatcttttcaggtccaatttctcctacaaatcatcatcaatcgttgtgcaattcttcttgtggatcgaaggaatgcaaaccgtctgaaggtcggcgttgccatcttaatcaccgctatcaatatctcagtctacgctatttggattcccgcacgtctgcaaatctccgaaacttacatccgggtaaatgaccgatgggatcgttgcgaaaaagtcatctaccttcttgtggatggagcgctcaacttttatttcatacggattgttcgatcaagcctagtgtcggccggcttgggaaaatacaaaaccctagtccatttcaatatcggcattattggattgtctcttggtatggatgtcttgattatatccatgatgagcttgaataatacatttgtgtgagtaaagtcctaaaaaatcaaaaggaaaactgctaataacacccttagctatatgcaatttcatcctcttgcctatatggtcaaactcaacatcgagatgtcaatggctgatcttattgggagaattgctagtgatcgttcttctgtcatcatctgtaatgataccttggagttggctggcgcgggggacacacaagaggttaggttcgtctccctctagccacaactcggtggatgcacaatacctgtattcaaattatatattaatcgtatctaatacagttcaaagaatgcttaccgtatattgactgagagccgaggctatatatttactgtgtggggcaagttggtagacatccttagaagtcctaccaagtattgactacctgcggtatgcacaatagggctatatctatgtataaaaggacgttatgctgaaattctagcctttttgcctgtcaatagctatcgataaacatttttgatactatatgtcggaatttttcatgaatagaaatatatatcttcgtcactgctgtattaatttcccacaatttcctcaagtgattagatttcatatagaaagtaataatctgtaagaaagtatggaagaaggccttttctggttggtatgaggctatagtacggatggcctcgcggtgacaaataaatcgacgagcagcgtctgcgtctgtgatagattagtgtgtgaagaagctaggggcaaacgtggctttagatactgctagttgcaacgctatgataggaaatgattctttttagatgcttgtgatatttagggagctcctaaagccctcaagcatcggacacgcactagctacatcaagcaaaaaccaaggactaaggatctttaaaagtatcaacccaccactccggatgcaatattcgatcgcacacattatctctacaacattccttgccttcattaaagggcttacgatcaaatagcaatttgcggttgattgttgcattcccattcagaatttggaccctgtaccactccgccagtcctaaagcgtcggcaatgactccatcctcggtgtcatgcgctttggagactggtagcgagatacaccaccggaattgtcgatccatgggctcaggagtaaattcgaacttcatctcccgaatacgttcaattataaggcaaatcaacgctccgtcggtgcgaagataaaaatggtccttggtagtaaaggttatattgacccacatgttttcgggactctcatctacacctgggccgtggtggatggtaatgtaatatgacattccgaagcccgtagaatgttgaggggcttgtattctggtgccacctgtaccgatataattttggtttgtcagtgagctagatgctgggaactgaagcccaataaatacgggactagccgactataaaagaatgtttccccctaagacatactgctttggactcttttggcgagaacaaaggcattctattctaatcccattgttagatctttcatacgtttaaattagcagacaaagacttgaaattaattgcatttttcatttttttctcgccattctatcaggccccgtagtgttctcgggagtagcgttggaggccatttctggtgatattgggtacaacgacaaacaaatgggctacagatgtgccatctttcccctcccatctgcttctttacccttgcttgttgttcttctcgagtttaggagggccgccttgggtgagtttgtagctagtgctagaaaagtgaaaggtcagcaaaaacacatggaaacagacagcgcggatggactgactactccctcttcatagacctcggcctacgatagttagcatggaaccataactagcagaaagaccgatagacatacggacgtatctgatcaacggagataccgggatacttatcaccttctttcttcaagacaagttagcataaagtaagttatccctagtgtatagaatactcactaggtgatactggcgtatgtgtcgacgcagcattggagccgggtttccaatcttcgccgtcttttcagtcttccatgagcagtaagggcaccgctttgcacagtccggaatgaactaaacatggtacgtgtcagtcaaatgaacagaaggttcagacagtcgagagtcttacaagaatggcatgctcggccggccatgtagtttcggggtgctgtgggcagtcgcagagcttcgcgttggggctggtattatgttagccagtagtataaggtaatgagcttgacgtcttatggtgatacgtacgcccatgatgttggctcagtaggacgagagcttttccagcaatcgccgtgtggccacgaagacggatctggcaaagcagtcgccgtaccagtttgggcgtttgaggcctcggtatcaaccagctgactaggctgggaatttgggcaggaatcgccctttggggtcaagggcgactccatgtcgtccgtggggttgcgctccatttggtttctacaaggtcaccatgaagatcagtatctcatgggtcagaggaagaatgaaagaagatagctggctactgaccgtggagactgatgggtggggtatgtcgcgttgcaaaggtgaaagtgagaaacgcggattgacgggtgcggtgtgtcgcgttggaaagtgaaagtgagaaacgtaggttcaagacaagtttatcagataaatcgcggttaccgttggcaccatgcttccatattgtcggattctctcccatcattagttccacttctcgcaaatttggactacttgtgcattctacctaactaaaagatacgtcttgtcacaaatttggttcggggatacgggcattttcgaagattttggagttactcatatctttcttgatgagtaaatacccaggtacagactctaccgtgagaaagcagaaagtgacactcccagacctcagaagtgagaggaaaaatagatcatactcgtatattaaagtataactacgtacgaagggtgaagaagaatcaccgagtagcaactactagagaatatatatctattacatttcgatcgtatccacaatcacattcaaaattttcgcgcgatattcactcctggtcggtcgttgtaatagtgatctctttcgaaacattggaagtgtgtaccacatgagagagtgcctgaatttgctgcttgtgttgaacagaaattcgagtatagcgcacgataatcccagttcccatcagtgaatagcagcccgacttatttcatcctatgaaatgcatatgtagggttttagtagatcacgttcaaaagtgacgtcacctgatatattcgataagatctgatagtgatcacgtgactcaccgccctctttgagtcagagtgagtcaaaaagggaaggaaaggaaaaagaaaaggcaaaaaaaaaaaagatcccccgagcgatttccccctctttatgggtcattgtctaagcggggctcggcgattcactgccattttttctccgttgcgttgcccctctaaaccttcgacttttccgattttgagacgcgcattcggtacacgaagattctcaatcatgtccgcagcttctcttcctgcctctgttgaggctctgtcgctccaatccacggcacagaagtctcaatttgccggctgcttcccgacactgaacccgatggatatttaccgccagcacatcgcggaggagttgggcaaagccgctggtatcgattctcagaagatctacccgcggattgcctggactagtactttggacaagggtgatctttcattgccggtatgtggcggcatatcctgggcgcaattcgcatgttccgcatgatcatgaggccttggactaacaatgtcttattgcgtaccgttaggtggcttctcttcagatcaagcaaaaccccgtggagcttgccagggatcttgtcgccaagttccccgcctccgaccttattcaccctccaactcagcttggtcctcacatccagttcttctgcaaacgtcagccattgaccaacaatgttcttggccgtatcctgaaggagaaggccgcctatggaacaaatggtaatcagggtctgaaggacccctccgacccctccaagggccagaagaagatcattatcgagttctcatcgcccaacatcgccaagcccttccacgccggtcatctgcgcagtaccatcatcggtggtttcctcgccaatatctacactgttatgggatggaacgtgatcaaaatgaactacctgggtgattggggtaagcagtatggtctgttggccaacggcttcaagcagtttggcgacgaagaagctcttatcaaggatcctatcaaccacctattcgatgtctatgtcaagatcaaccgtcaggtcagtgaccaggagggacctatcaaggagctgaaggaacaaatcaaggcaaagaaggagaagagcgaggatgttgccgagctcgaggcacagcttgccaagcttgtggatgtgagcgaggatgagaaggcccgccgctactttaagagtatggaggacggtgacccggaggccctcgctctctggcgcaagttccgcgatctcagcattgagaagtacaagcagacatacgctcgtctcaatattgacttcgatgtttactccggtgaatctcagatcaagtctgagagcatgaccgacgcgtacaaggtcatggaggaggccggtgtttccgagaagtccgagggtgctgttattgtggacttcaccaagcacggtgccaagaagctgggcaaggctattattgtccgcaaggatggcactcctctctacctgactcgcgacatcggtgccatcactgagcgtgataacgagtaccactttgacaagatgatctacgttgttgccgctcagcaggatctccacttggctcagctcttcaaggtcactgaacttatgggccacaaggacctggcctcccgttgccagcacattaacttcggtatggtccgtggtatgagcacccgtaagggtaccgtcaaattcttggatgacatcctgcgcgatgtaggtgacaagatgcacgaggtcatgaagaagaatgaagtcaagtatgcgcaggtcgaggatcctgtgaagactgccgatattctgggtatcacctccgtcatggtgcaagacatgactggcaagcggtatgtacaaagtgtttttctttcccgcctactcccgtatatccgtttactaattgttcgttttctttcagcgttaacggctacgagttcaacttggatgccatgacatccttcgagggtgacaccggcccatacctgcaatacgctcatgctcgtctgtgctcgatgacccgcaagtccgagttggatgttaatgagctagttaacgccaactttgatcttttgaccgagcagcatgctgttgacttgatccgcctgctggcccaatggcccgacgtactcctccagactgccaagactctcgagcccatcactgtcctcagctacctgttcaagatgacacacatgttgagctccagctacgatgtgctcaaggtgatcggtagcgagccagatgtcaagcaggcgcgtatggcgttgtatgcctcagcccgccaagttctgaacaacggcatgcgtgttcttggtctcagccctgttcagcggttcgtctttcccacccttattgaagaagcaatcactgacttatctgttctagtatgtaaattcggcttattcggtcgattttgctcacttttctgtgtggcgttttactcagtatttctaagactgttgtctctggtataccttgattttaatttagttgcattgggcgccaagagcgggacgaataaaaatggcatcatgcctctgcttttaccaatatcattctcagatttcccctttcttctcttctcttctttctttgcttttccgatgccgtatcatcaagaagaaatgggggcgacccccgacggggtcggggttgggtctgaaacccgtctccatattataccacgcactcctacatggcagacacgctattgtttgtgaatttcatctgggctatgattcttccaagcccattgtccattagaggacgggtctccctgatcggggactatcgagatcttatgtcaggttgggcttgagttccaaggttgagccctatattcagccttaaatcggggaccaacttggacatgtaacaaggatttcgtctcgacactagacaggggcttgtaagtctatgggtttggttattcagattatgggtgtatttaaaattgtagaacttcggcccgcgaacctggacatgggttaggttagattccaattctctcgtatcggccgtgaaccgtctacattatcctgcagcacaggcgatccctcacccttttaacgcacccagcaccctggacctggaacgcaatgacactggtcactccttgatgaaccagaccgttcaaaatttctcgtggcagggtttaacggttaccgtcaaggatcgtgaaacaaaaaggtcccgtgatttggtatcaagtggtgatacgtaacatgggttagatccttgtccataccccatatcagaactagcatattgatgctggttctacagggaagctcgttgctctaatgggcacgtcaggctgcgacaagacaacacccctcaacgtgcttgctcgacgtatcgcatcagccggtgcgaagtttgtcggggagaactctgtgaacagcgcataaaaggacttacgcaattttcagcgggtgacctcgtacggctatagagagctacttcagtggcattggctatccaatccctgcgcaaactaaccctgctgaatttatcttggatactgtcagttctgattttttttcagcttgaagaaactggagaaggaacgggtcgtggtcattcaagctgcctaggcaaactcaaacgagacgaagtcagcgaatacactctgcggaggaacatcttagaagagcctttacgaaagaaaatactccaccgggaatgacttcgactactatagctctgctgaatcaatcatttatcaagttctacggccatgccattgcttgtggaatcagtgtagctatgtctttatccatcctaggattatagccgtttatcaacgtcattgtaggctttacatgtccttcgcattgaagtcaacctcacaatcctccccaacgacggcagcagggtgacaatttctgttctttcaacgaaaagaatgtatttcaacacaaatactaagatagagcgtagaggaggggcaaggaagaacggagcaaattttcggatgatagaactttccgtcgtacgatcggccaagtcatagaatacatggtcgataagcgggtcccatacgcattctattcaacgtatatgggaaacagccatgcttcgatacgtctgggctaacggaatgttggtgagtgctcgataacccaccctccgtcagcccagacgtatcgaagaacgattgttccgtataagttgaatggaacccatatagagcctgcttgattagcatggaccccacgacttggccgatcatatgacggaaagttctatcatccgaacattggcttcctgtccgcaattccagaggtgaagatcaggacaagtaaagaaaatccaaagtagaatggtagaggatggcagactagggaaacctagtaaaagagtgccaaatgtggaatcaatggaaaggaaatgaggttcaaaagtgttagagaggaatagcgaggtgaaagagaaagagatgagagaaatgctggcatttatagacacgttcacgcttctaaacttgactagttacttctgagcgatgcctgatgtattctagatgattgctatggcattgaagcactgccgttacccacacaatttgatgaacagcttcggcaaggacgcagagtgggcaggggtcgctcaatgaacttgactcttggaagaatctaattcacttgtgtcatgagtgtcaaatcagaaaataaaaaacaagcatagaaagaacatgatctcaagagttcatttcaacgcgtttgtcaaatgctagcaaacgggcaaattggtgtgacactattggtctcaagctttctcattggatatttctcattagacttccctacctctgtacgtacccgttactttcctgtcacatacagcaggagccttcttggcttggatgatgtggatattcctccttgtggcagctggatccctagtggtcctcataacatcgatattcccaacctttgtaatccccttggcacctgtcacatccaaatagcctttggagtgtcggagggtttatggtcatgcagaagtttccgttttggaaatatgtgttttactgcatcgattaccaggtatcctgatgcacttcttccagaagcttattttgttgtcaggataatcactcattcgcttgggatctgaaataggtttatgtactccatggtatgatggtcaatgagctttctgagcgaattacttgtggtgccgattgtcgatgtatacggtttactaacctagaggatcagtgtcttatttggggcactgaagtgatataatcgtatgatttaggaggccgaacaaatcgagcagccttggagatactctgtgtttgactacgctatgggtactgtcaatatcaattagtttgagtggacgcaattgatagaagatggatttgcttccacctggacaaggttcggaaacttcatccggaatggcagccaccaatctcccgagaacctaaagaggtccccaatcgagcaagctgttgtatattccgtagcaccttgatagtacgccgggcttgaagtatagccacggggacacttgactcacatggcagctggctttcgtatcacatcagataatgctgcttacatcgcgtgccgaagcctaagtcgtcatgaaaaaagcctatctggagctgacgaatcatgtcatctacaacagaaaacggggtgatgcgcaacacaatatgcaagtcatgtactccgtataccgatgtactactatgtacaagaaccttctataatgtttctgaagccgcgatagaagtctcgcgaaccgacaaaggaatagagttagactgagactgatttcccctcatcttcatcgtcgaagcaccgtttatcagtaatcatgaaagagcggtgaagatttcgacttcggggagctgatgccatctcgcagaacgaagcaagggggtggctcccttgaccatgtttgagttcccctaggtgagtcaatgaatcactggcggcagatgtcaacgtgatcacaccatgaagtgatatgcgaggaaagcttgttcgctgtttttccatgtccaagtattcagatatttcttgttgcgcacagcatgttcttagtactccaggtcccgatgcgagggtctatattggtgaagacaaaactggagccgcatggagatcctgagttatatctggagcggagcccttttcctggtttgatctttcagccgcttaagctgaagatatccactccggcctaagaggattttgatcagcccggaatacatgactagggtccaggatatattggatgctatcggctacgtatagtttaaattggttgttgtgagctctaaccttgtagtgttttcattcccacacgtgcggagtaaacattcctcaaccctcttaatctaagatgcaagggtgaatccgtaagggcaatgatagaccgtccgtgctgcatgtcataccgatctggccagttctgcctagtgagagaaggtttcggccaattatttcatcactgggtcgatatagtgcaccatgtatagagtacttcaaaactttagtccatatcgttgaaccgatagcagatttccatgggtttcccaccagtgtgcgtcatgaataagaagtatgcaggcggagaagagccaacgtccaaagatatcctgccacatggaggggctctgactacatactaatgccatgcagcgctcgtccctcttgtgcttgacatctgtggtttctatggtagaagtaaattgagtcattgcacggtggcgatggtatcaggacacatacaggtgtctgcctacagtctacctaacaagagagaatatggagtagccgtagttacctagtggtgagccggcttgcagtgtcatccccgccgacatttccccgtgtaccggatacattggcattgtatttgaggcctgcattgaccaatgcacagaaaaggaaatcaaacaacaacaatcggagcgaaggagaatctagattttccgagaaccgagccatagccgacaggaacaggatccttttggattgacatggaaaacccttcacggcggaggcgatcattgggccgcaacgccggttgggcgttggatgtgggatgcaattagggagaaataggaatgaggaatgcgacacacgaaaatgcagaacacgggatgggaaaagaaaagggaaggaaggaaataaagtaaataaagtaaataaagataagaaaagtcaagggacaggtcaaccatggatccccagcagtcaaaccaaggatttcccctccagcgggtcccgagcttaaaagcacaaacaataaagaattagaatccatggatcggaaacaacatattctatttaagtattgtacaagatacaatatacaatatatacaatatagtaattattctaattattctctgctccaaatacatgtaaatagataaatacaaatgcaaatataatataaaacactgatgacgctatcccccactttcttcttttttttcttttgtgttgggtaccgagagcctcttcatgaaactttttttttcttttttttttttctaatcctgtgtggtcctgtacctgtaccttcgggttattcctcttcctgctcgttctctttatggtctctatactcctctgagtcctctccttttctaattatctttccctctctccgtccttctttccccttgagatctcaatcaaatcacccctcacttcgttgttatttcatcgctgcccatcgactccactctccccactgcgttctaagaccgtcaggcagaggatcctaaattctcaacccaacctctgcagctgcagttccttcaaccactcatcggctgccagagaggtcattttctattttcctccttcttcctttgacccaacgcgtccgcccaactcttagccttacatcccacttcgatggagacgttgcgatttgaaaagtaccatcttgctccctccgcttgacagaacccgtcgcccgtcgcctgccatcgcccgctgcgatcggcaggtccgcttacttgtttgagtggcccacttgggttgggcactggggagaagagaaagggaagaaaaaacggatccatttggtcagatctacggggtcgagagggggggaagaacaatatacattctgactcatcgtcaaaggagcagtggcttgctgtaagttgaatatcgctggagccctgtgggagccacccacgtcgcccttgtcggaaacgggaccaaccctgtttttttattttttttttttcgctagacacccgatcgccttgcagcccacataatggccggtaacggcccccggcctgcctgcgtcgaagattacgacgaagaacaacaacacaccctacccgacaccagactttcggccattattgctgccaatacagctgccaaattatcctccaggttggaaagattccaggagccgctgatcgacggtgccagtgactcaggttattctagtcgcaccgccgctacggttaatagcacccaatctgcgccgtcgggcggaaaaagccccccgatccctcttaagctggacacttccaagcgtaacgacctcgccaggaaaagttcaaccagagaacgcaaggacaaagaacgatctcgacccccgcgcgaagagatgatggttggtgcctatccgggcgctgcccatcacgctcacgtgccccggtcgtcgtccaagtctcgtcgacgagaatctgcccatatccaatatcacgacaactattacgactacggtactcagtaccatcaatcaaccccgattgaccaccgacagaacgactactcctactacgcccagccacgcccacccatcccagaatactcatcgtccccgcacaatcctcgttatgcccccggcgccatagagaacattcatgtcagtcaccctggtcgacccagccgctccaattcgtatcacacctataattccaacggacgacccatgagtttccacggtatgccacatggaatgggttctggaatggcatctccgatgtactctcagcacggatacgatcatggccctccaccagccagctcggcatacatgcaaccatactcgtcatctccatacacgcaatcttcttactatgccccatcggcctcggactacctcccatcggagtatccacgagagcggtccctgtcccgggaaccatcacgccgtcggtcctcatcgatctatactgcccccaacccacccatggactctggggcgtattcgccatggtttgatgaagatccacccacggaccactattcctcgcgagatgttgtccgtgaccgtcctcccccaagacaacaggaacaggatgaagactactatcggatgccaccgccaggagctaagcccaagcccaggccacagatccaccaggcgaagcgaccagagcggccagacctaccgcggaagatgcatacctcttcgggtattgtcccatctcaacgtctcacatccaggggcatagatagagaacgaggcatcgacagggacagaggcatcgacagggacagaggcattgacagagagcgaggcatcgacagagagcgaggcatcgacagagagcgaggcatcgagagagagcgaggcatcgacagagagcgaggcatcgacagagatttggacatgtcggaacttgcagctgccttgccggtggttcaagaccgcgcccgtcgtcgagtttcaagggacgccccgttgccagagagagcccgtagcctacgagatcaccgacgatccgtgtcctaccaggatgatcgacggtctgctcaggtggccgtggccagctctcggcgacggaagccaaccgagtactactacgatgccccatccagcgccgccggtgatctcgaagatcgcgagcgtgaagccgagaactatcaggcagcccgatccggccgaacctcagcgcccgcattacctctctccgcggagtccttgctccctaccaaagcgtctcaccgcaacgggagcgagagcggcagccagaacagtcggtcgagcggcagccgcggcagtgccacggcctcacagaaggaggatgacaagaacatgaccctcacgttgaacggattccaaattggatttgcacctgaagcagtcgctggcaaatctattaacattcgtgctggggagactggggctgtccgattgaacatcggtggcccgcggccatccaagcagcgtgtgaacggtaccagctctgattatgcgggtagctccagccgtcgggaacttgaagatgtggtgaggcgtccgcgggatgatagacggtcggaacgacctagtcgtcgagacagccagtcgacctacgggactactcgctaccattgattttttacccctgttagatgtgtcattttctgtgtttcttttcttctatcatggtcagatattattttttgttgtgattccatcttgtgtctacataaccatgtggctggccttgttcatttttcaaaagtttcgattgctttgcgttttttttttttctcttcttctttgggatcgggtgcttgtgcaacaaaaaaacaacggggattacctaacgcgaggctctgttgggcaacttggggaacaggctggactttgtcatgaggtccagagttttctgttgcccaatggtctcgctaaaatgggaggacttttgtgtgatttcatttgcaactgctggctcgatttgctttctttatttgtgtgcttgggcaaaatggtcgggcacaaaccccatgatgatgtgtttattatggcgatatgattgtacgattctgatgacctgcaatgacaagtctgatgtgctttactttccgatgtcttctttttgtcagcgtttcttgtatagcctttcttgttgggcccgtgtctttctcctggttaccttgttcgcgactccgagtggcggagagagattatacccatgtctttttacttgtcatgtctcaacaggtcatctttttctttggccatatctatgattttatgtgtcttggtatttggtatttggtcccgctgggagtctcgtagttctcttcttgggctttgtattcattcggttgatttctgcagtgttgctgatcttccgtgttctatcgtccatcggtcttgatatattttcctgcgtttgcttcttagttggttttgataccccgcaagctgtctgggcgtgatcacagctttcgactgtgtatgtctctttcggaggattccagcgggtggcatttgtcgacttgatataattgatccattattaaatccgttttctagcaaagggcatgtttcagatttaaatagaagtcaattgcgatcgactctttttatagatcgacccacgggtggcccaactctacccgtacacggacccgtggacgccagtcagtgtgggggatgatgtaatcaggttgcccgtgacaaccattgtaaacaccagtcccagcctcttctctccaacctcctcaatttcatgccgaaagtcaagctgaatcatacatttgggttgatatttcccaatcttcttatcttaacatcctacgatctagacactgtgcttcgcttttgcccacattctgcacccgcattctatacccacattccaggtgtcagagatctctacctacatctggtgttgatcacttgcctcaatgtatgttcatgtacctcataattcaatcccaaggatgccaaagtactaacgatccgatagtgagtccagtcttgagccgggtgctcttggccactctaatactccaccatgcctccattttggccgaccggaccctccgccgacattccaggaggaaccgttgacggactctatgtccgggatgtcagcagcgagaacattgctaataccttatcttcggtcgaccctaatccccataagctcctcccacgagattcagacgactcggattccacgccaaaatatggcgcaggcacggtcgacccgcacagcatcaagatgcaaggcctgatggccttgtttgcccttatcggactggcatttgtcataggaggaatctggttcttcttctgggctaagaacggcggatttgtctggcgcaagggcgactgggatgactacaagtccactgttctgcgacgaaagggacccgacggaaagactctcagtaatgccacagcgagtaccaatcttggtggtggaagtgttgtcggcaagggctacaccgacgacggatactcgtttacagaaggatcatacgacgacacagcgacaactgtcacggaggagaagtcacggcgcaagaagttcagagagaccgctaaagagaagcttctccggcgcaacaagcacgagcagtgggaaggtgcagatgatgccgacgtgcgcgcctaccgagcagaaaagcccgctcgcattggtggcatgaaccgcgaagccgacggaacctacaatggcagcgactacgacacctccgccccgcctacccattaccaacagagcgaaatgagccatgctcatgacttcgcttacgagcagccacgacgtcagcaccgtgatccctccggcttctcgttcacccaaggcagtgaggatgttatcagccaagttaccgatcagcctcgtatccgcgacccatcaacccgccgccacaaccgccgtcgcgaacgacgcagtgagcttgccctacccgccccaccttccgcaccttcatctcgtactagcagccctcgcaagcaccgtgagcgccgctctgtgccccacggtcacttcaccgagcccctggatttctcatctgcaggatcccgttccgaatatcaatactccaacgtggacaccgaggattcagataccaagagctacaagcatccaattcctggtttgacgaagggataccgccgcgatggacggagccgtcgtcgtgacagtctgagtgatagtgagggcgagacacagtactcatgaattacgactgcagatcgggctagggtttgatgtacgagataccctacttgatgtatgggatttgattttgaacgttcaacaattattgggttatggaaatagcgtgctttttacggcaaatgccgatcgacttatggatatggatatgggaaattgctttggtcatgtacataatgaagagaatcacgatgcaaatggataatatgtctgcactgtagtaggtgtagatatttcatttgttgctagccacctaggcatgtttaaacggtcgcttccgagttgtccgacatacactttagctctgcaccatgtacttcctttaaaccacaacctgaggttgggatacacacatacatcgtttcttgtgcatattcaactaccacccgtcccaaattatcgtcaagccaaaaacccctcgttgttgacgacatggcttcctgtacgtcatcaacctcccaaatccacaacatcctaatccccacaacagcaccccaagaccgccgaccacttatcatctccggtccctcaggcgcaggcaaaggaaccctgatccaaaagctcatcgacacacacccccatacattcgaactaacagtctcccacacaacgcggcaaccacgccccggtgaaaaagacggtatatcctaccacttcgtctcggtcgagacatacaacactctcaagcacaacggggatctaatagaagacgccatgtacaccggtgccttctacggcacgagtaaagcagcactcgcggaaatactcgacaaaggtctcattccgattcttgatatcgagatgactggcgtgcagcaggtgaaaacaagcgggtttgatgcccgctatgtttttgttaaaccgcgggatcttggtgtgctggaggagaggcttaggggccgggggacggagagtgagagggatattcgggctagacttgatcgcgcgaggagggagcttgagtttgcggagactgcgggtgtttttcagaggattattgttaatgatgatctcgggagggcttatgctgagcttgagggttttgtttttgggttgggctaggtagtggtgaggctcattggcagtgttcacctattttcgatttagaagttattattggaatgggaagactctctccaggctacaagaatgcctcaccaactagggaggtaatcagccattgaggctacatttgggttcatagtcagaggtgtagtccgccggcgaagattcggtgtccggggtaataggttgcagctgcgccaccgggtcaatttaatacttggatatggtctgtaatatttctgaacgtctgttgtgattgtactctacctgcgctagttatgcgtcctgtctatgacactcattttcaaaaatgaaataagacgctcaggttgttgatggtgtgatttacgttttcggcagttatgatattcagcgtggtccgtagtacacctgcatatcattttcttcatcacgttcctgtcgaggtataagccgcatttcccgcatttttcggatcagatagcgcttagctgacaggtactttcctgataggctttgccacgttggcagtgtcacgggttgattcagggggcggcgcaggtactccataccagttggttggttatgtatttccgggagggtactaaatcaggaaggatggcacggatgactcggtcaaagcatcatattcgttctatccatgactcgcttttggtggcttcgtcggtcttgtatgtatagtccagaaaagtgcctattagcgctgtggatgttgcttttggagaaagaacacctgaggaagtggcgataaccgttgcagggtttccgatgctgtagatctcgatgctcgagcacccctccaaccgtcaagttagagcgaataagatactcggaaggcagacttcacttctagttctggcataaccatctgccgtggacggcggctacatagtgagaccgtgatgagcctcgatcatagtacatattgatataggtcaagtcacctgggataaacgattccatacgatgcctggccaagatgccattgctaatggtttcacagtaaggagtacccccgtcatattccacaacggagattatagaccaacacattcgaatattgctaagcaaggttgaacagccctggaggaaagaatgctattgataaacccgataatttctcaagagaagagaataggagagctttgtcctcgaagctacaccacatctgggggttgtaaaaggcgcagttactgacgctttgatgtccaaatcgaaacctccaatgacccttactccgtaatccacctgcattgcattagcgcctgcgcttcaatgtattattggctaccctgaatgcaatggtaaattgtgagccaaagcattagaggtatatcagccacaataagttaagcccctcattgacaggtctctcattggattctacttccactcagcgatcatgtgctgcttgccaaagcctctcccgcgagtcagcgcttgagaacaaaccaacttgatccatatcatacgcgccatgcatatactatctctcttaagatattggtgatgtaaacggtccgagccgcatggtactggtactggaggggtgtagtagatgagcgatatagaaaccccaaggcttttatatttatctgcctgatcttcctcgatttctaatttcttcctcttgtatgtaaaagtcatggcttcgaactgggtacttcatcatgagagcaaccgatgggttcggcccatctacaaccattctggtgtgcatcactggctgcatgatgaccgattgcagtaactgaccgtaacaaaaggagagtttctctacgaatgggactgcatgggtggcgagttaactcctgccatagcgggtcaagattcaaggttagtcttccattcttcttgtgtgagaagtccggggaagtaatccgtttaataaaagcgtcgcgctatgccaacgaagcacctccgagtccgcgtttcccacactcaaagatgcatacggacatcagctcccattccaccccgggctagaccctcatgcaagtcgcctaaatcgtgtacatcagcaggacccgctcgattacggccaagcatataccaacgatcatttcaatccccggactccaccgaccggataccagcagcttatcaatcaccaagtggataatggtatatacccaggtgcaggcacagtgacagatggcaaggcaagcagtccgccagaatggagcccgggaatgcagtacaaggtagccagagacacaaccggtcgcagaacagggtctgcaagcatatccgaccgtagcgatgtcactagctcgtcaagaagtgatgtatccattcccgaaatccatatcgaggatctgcagggattgagtctcggggatcatccagcctcgcatatggtgctgccctatgaggccagcagtcatagtcactgcaatgattccattcccggggatgtccaacgaaaaaggcatgacagaaaggtggtaagtagttagttttccttcctgtttcgactgattggctaattttgacatagcaaaagtcctcggaacctgcatacgtgatccccggcagtagcagcgaacatgacacacttgatcctcgtaagcaacagcctaggcccgctttatgcatatccggaaaaagaaactgacgatgattcacacgcatcaggctacaagaggcagagcgatcctcggagatttttccgagttggcagggtttgttcacctcacatgcatgtcagttgaaggccctgctgataattgattgcgatcatacaggtcttttcgatgctctggcatgagaatgcaggctggcatggaactatcgtcagcgagaagcttccctcatcgtcaagcccattcacacggggcaagtatcaagaacccatatacagtagcatccgacgcatggtagtggtcaaagagcagaagggctgctgctggtgtgtgtacgtggaaagatttgcatccagtgtcagctgcatttgtatcatactaatccatcattttagacccatcactacctatagtggccaaggcgtggcgaaagccggggttgaccgcagcaaacatgccgtcattcacatgcgaggcgatagacctcgaactgtgaaattcgaaccccggatggccaaagagccactcgaggttgatcctgccaggcctgatcagaagctagattgtatgtcccgagtgaactttggcaaagtttataccgtcgagcacaatgtgaaagttcttcccgtgggcaagatcacggaagcatctcgggcgagattcctagaatacgctcagggtgagtttatcaactaggaatagagcgcgagcatagaatttatccacaggaaagatgcttctatgtcggtctacattgcctgtggggcgatgcatgtcgacaattcaacatccagacttcctgtttgttattattatttgtatttgttttgttcaggggagcgatacgggaattatatctaacgtctgcggttatttgattttgaatagcgagttttatcatgaatggttcttcgaatttgatgacatctgtatttgatcttgaagatgggctttgcttgcaataagtcaacggtttagaacaacatgagaatatagagtcgggagatgtctgtatcatagcttggaatatgtctacctgggaggccctttatgctcactagtcaaggactttccactctgttctggccattcatgaaagattggtgtttaggcttaaatcgatctatatcaactaccgagatatattttcggctgggggtaggatatgtcacaaaaaaacacctgtctacatatccccaaataagattacagtgcggatatgtaccggacttatcatgcatcctttagattagcaaagcctccaagactcagagattctcctcgatcatttatagttgttccacggagctccgcctgaggcagcaagattatgtcatacataaaatcttccaattcaccgcccgcaataaactcaccgcccgacaagatttccgaaaaaagtttcaacttctgcagattcgatcaaggaaatatctaacacaatggcgatgaaacgcaagttagacgcaaatgatgttccatccccggaggctgctggggtggaggatcaggaattggactttgaagccctcaacctcgatcctcgattgcgccaggctctgatcaaggaaaagttcaccaaacccactcttgtacagtccaaggcgattccgcttgctctggaaggaaaagatattcttggtgagacgagcctcttgaatcgatgaatcaaaaagcagagctgacagaaatagcccgtgcgaaaactggctctggcaagaccgccgcctatgtccttccaatcctgcaagccatcctccagcagaagactgttcgtttcctcttcccccttctatatatatgtacttggtatggaaatcaatctaacactgtacaaataggccgatcccccctcaaaagccacaaccgctcttattcttgtccccactcgcgagcttgcagaacaggtccagaaagtgatcacatctttcgcttgtttctgcggaaaggacatccggtcagtcaacttaacacagaaggtttcggatgaagttcagcgctcgatgctggccgatttcccggatatcgttgtgtcgacacctacccgggtttacagcaatgtcaacaactccgctttgtcgctcgataaagtcactcatttggtcatcgatgaggcagacttggttttgtcatacggatatgacgaggaaatcaatgctctcgccaaggccatcccgcgaggcgcgcagacatttttgatgagtgctactctcacttcggaggtagatacattgaaagatttgtactgtcggaaccctgtgattctcaagctagaggagaaggaagagaagggtgctggtgtcagccagtttgttgtccggtaagacaatatcctactgccgttattatagcagttgctaactcaactccacagatgcgcggaagacgagaaattccttctcacgtatgtcattttcaaactgcagctgatcaaaggaaaggtcatcattttcgtagccgatgtggaccgatgctaccgtgtgaagctcttccttgaacagttcggtctcaagagctgtgtcctgaactcagaacttcccattaattcgcgaatccacgttgtcgaagaattcaataagggcgtatacgacatcattgtcgcagccgacgagcaagcagtattgggagtgcccaagtcgaagaagtcgcgcgaagctaaggaggaaaccgaagaggaagcaaaggaggagatgggaagcagcgaagatgaagaggcagttgatgaaagtggaaaggaaaagaagccggaatccaagaagcgccgcaagatgactagcaaggaaaaggactacagcattgctcgcggcatcgatttccaaaatgtcgcctgcgttctcaacttcgacctccccaccagctccaaatcctacacccaccgcatcggacgtaccggccgcgccggcaaagcaggaatggctctctccttcgttatccccaccgagcaatacggcaagcaccgccccacctcaatccccagcacaaagcatgacgaagccctgctcgccaagatcatcaagcggcaagccaagctcggccacgaagtcaagccctaccacttcgagatgtcgcaagtcgatgccttccgctaccgtatgacagatgccctgcgttccgtgaccagacttgcagtgcaagaagcacgaggacgtgaaatccgccaggaactgatcaagagcgaaaagctcaagcgccatttcgaggaaaaccccgaagaattgcggcagctacgccacgacggcgagctgcgccctgcgcgtgtccaggcgcatctcaagcatgtgcctgattacctaatgcctgctaagggacgcaagggtctctcgaaggatgttggattcgttgggttctcaaagacgaagcagaatcgcatccgcaaggcaagagatcgcaatcgtgcgcgtgggaaggctggtgggaaggttgatcccctgaagacgtttaatcgttccaaaaaatagttgcatagttttaaaatctgcgggcgttttgtccggataccattgtatagtcagacatgaataaaatagtctcaatttgcgctcctgattgcatgcgtaggatgctttctttttcgcttcggtgatatacattgtacatagatcattgtgcatacagtagacttttataaataaaccaataattcctgcccatccagcgatctgattgtttcaggttcaacgtctttcaaccctgaaccgagctcgatttcgagccatttcttccccctccttatctgccgaatgtgctttagcacatcacgcgcattttgaaggtgatatgcatggatagaagagttcggcaagcctgtttgcagcgtggagacttcatgagacggcacatgagacgagtcgtgggactccgtcaaatccagaaagccggggccgatgccaagccattcgacatctctccaagatctgttccactctgggccaacggtatcagggctctgtgggaacccatccgggtctttcccaacccattttaaagctggtagccattcgccgcagccctcaaggtccaaccatttcaggcagtacgtcgaacgggatagctgacggagaatactcgcagcttcggcccaattgttgtcaagggcgtctggggccaagaagcgggccactgagctgcgaatccgagtagtggcagcgcttggatttcggcacggtataggccaatgggcaagcgagagatgagtcagggttggcaaatgtgctaatagattgagaagagcagtccagcttgcagcactaggtgtcgggtgtgctagagataaggcgcggagttgggggaagcgtagagtctgggaaatggccttgggaatggacggagttgaaagacgatcatccatagcttcctctcggccgttataaacatcttcatcccatgaagctggaataatctcctctgtttcatgacctgagactcccacgactggagcctgcgagatggtcacctcgtttgtgagctgtttcaaagttatccagttccccagagcatttcccagatccaatcgcacgattttgaaatccccgtcaatagctcccgactcattaaaccctgggacctccttgccaatttgatcctggtcatgtcgggtcaaaaagagtggcttcaggcccttcatgtaccctctcagtggcgggcctcttgcgtacacagcaacataactcagcagcagttccttaatatgatttggaagatgggccagaaaagggccatcatattcaagatgccaacaccagttcaaagccattgttttcagcaccagatgtaccaggctccgatggtctgggaacagcggccccgggaggcgggccaaccggtgtatttcctcttctgaagattccggcatccgatggtgcgatccttgatctcccgccggatccgtatttccagcgagccaactcgcaggcggcggaggtccaacagttggtcgagttgggcgaaccccgaataccgtgcgacgaggaccggggcgaggtcgcggtggcgcggttgcagggagctcgagtacatcccgaagagacggatgaactgagcggggagccacaaacgagcgccgagcacgttgcgagcttggaggatcatcggatgaagcactaggcgtctgtgtacgtcggaggtgactgattaagtcgttgactgacgtcgctgacgcggagccctgtaccccagacccgccatcatgacgagacccagataatgcaaggctgtgatgtgctaagttggctggctttgcgtgaaaccgctggtgctttttgggcatctgtggtcgagctgcgggtttgacgaagtcaagtgtctccgggaagctttcccgcttttatcgcttatcgcccccacatttgatgggctgacatttgcggctcaaaaatatagaaaacaaaaacaaagattggcagaatgactcactgttgctcataataaaatctatacaatgttatacaatctatacacacgggctcagatatcccgaacccaagaatcgtccttcatatggccctcacgcttgggaccctcttcgagccaggtatccaccaagccctccttcgggtcctcgtcgggcagtccgcgagatcgacgaacgtccaagacaaggttcctgatcttaaaggtcacctctttgcgcagctcgacagcttctttgtcgttcaacagttcatcactcagcacccctaggggcagatcccgggaatcagggtatttcttctcgaccttctctttcaacttttgccaccgagatctcacttctccgaatacagcatccgagtccaccttggagccaaaggtaacgctgacatgtttgccaggccgaggaaggaatcgtgggaattcccgactctcgtgcataacatcgtcgaagccttcaatccacatcggaacaacatccggacactctttcggctctaagatgagccgtgcgattccccacttgaaatagcgcatggtctttcgtggcgactggtgaatcttgccttcggggaagatatggacccacgaatttgagttgcaggcgtatgcggtaggtgccatgtgtgagtccttgccatcggtagtgtaagcgactgggaggtccgagaatggatcgacacagacattgtgccggctccagtgctgaagttcgggtaaagcgcggtggtggtcaacggggaagggacccttcgataacaagcgaatagcctctgtgacagcgggttgagtcaagccaccgaatgcggaatgggcagaacggtgagtaggcagaaccttgcccatggtgaagaagagtgacagtggtcttatctccagtcagtaaaaccattcattgaagcattcgggtaaacatgtagataccttgtctgataacaaatatcgtagcttccaaaagaccaccgcttattccaaaaccgtggaggcaaaatgccccatactaatgggtcatccattctggtattccggcgcaatgtcagccatcttcacttttgcagtatgggttatctcgatccgaggctagtagagggacgtacacgctgatatgattggatactattttcagataaatcaattagcaactgcactggcttaatgcactttccaagattgttgtgttccggcatacctgtaatcaatcctcgcttccgttgcgaaacgtcatgtcgagaatctaacagctccgtgaatgcttccttcccgtgacattcggcatgacagaaaacagaaaggaagccgcgacatagacccgctactccccacattgttgtgttggataaagccctccatgggagggatggggactccgccgttgcgctcgagtccatgatggatggtgttgaactgttatacacaatccatgaacaagaagaggctttgcacaagctactaggagcttggaaagtgataagttctccgaagagcagatgtaattgtctcaagtgtacttagtagtttaaaaaaaatatcgcgttcctggaaatcgacagattcccgaaatcacatgattttggttggggtaaccattcagtaaagcattagaggccagcattaccatttttcgataatatgactggttgaaatttaagataaacaactaagctgactttccaagtcccgagaattttaacttttcctatatcaactgtctcaacgagtaaatgggctattccatcagtaaattttgtatacattcagtgcacggaccaagtacactcccgaactccgggcacgattttctcccggctacaccctgacaacaccactaaccaacgatgttcaaatcaacccaagcactatttggcggtctgctctggtgcgtctccggcccttagcccgcagcttcagtcattggaacccaagctaacattcttcccgaataataggaagaccccgtggcgtctctcctcccctcaaaaggcacgacagcgcaagcgcctgcgctccgtggacagggtcgtcgacaccgtcagcgccgcacttgagcgcaatggccagacctccaaggctgtgacccggtggtttgcagagatgccccgtgaggaggaaatgctgccgaaggacaagtacactcttttcgataagaaggagaagagctaccggaagagcattcacagtatgttctcgtgccattcttacccccttccccccacgttgacaccaaattggtattcattactatgtggatcggctgggctaaccaatttctctaccttcagagctgcccaagtggactcgtgtcagccaacgtgtcaaccctcccggtttctaaacggatttcttcaccccgcgcatgtactatacatccgaactcgactctggcgggggacttgtcggagcgaaaaacaatatatggacaaccggagttttggctttttggaatttgcagcgcggccactctgaagaggatggtggcttacaatgttccatgattaccccagcgcttagatcaggctttcaattcaaatgcattttggcaaggatattcatttgtgtttggttccggggtatactaatgatatagatgcagcgacagacatagtggtagtgaccgtatggcagcagaagtgatggatcagtgcgtttcaaatgagggtgcagttcgaaacttgcttgggttatagatagggcagaacaaaatgaatgcaagggtttggtgtgaagagtgagcggtttgagaagaatcacgagacaaggaagcttggagctcttgttctctcaaaatcatagtttgggatcaatttcccggacgcagtacgacagcacttgttgaattgagctgccacctccttgatcctgccccgatttactcggccttcgtggagggctttgtgaacacgatatccccggtggacttgttgccaatcatcgagcttctcttgccagcctgcgcctccttcataccaggcattcttctgcgcagtggacatatcaaagccttggggtggctttggcaaaagccagcagcctgtatcgacatgaccatcgggcggttcttcgaccgattcatcatacagtgtaatagtgcgaatggcgtctcgtatgccagataccctccgctgcttgttcactgcggcccgccaggagtctatacgaggagactgtgcgcgtttccttctggatatagggtactttggtctgggactgaagactggccgaggataaggaacgttgaatcgtgggtctccccgcatccgacgtgcatcggtagaaactcttgatacgggatcatagaccaaccatgtttctctattcagccagtggttggctagcaaggcaaaatggtatggcttttgccccggggtgaattcattgaagagccataacagttttcgatccagcctctccatcatcctgacctcccaatcactcaactcatcgacagcgcttcctgttttgagctggattcgatctgcagagcatcgagtaaggtctatgtctggccttttcccttgacgacgggacaggccctgatgttttgagtcacacataaatcgccattcatcagacaatgctggtctggctttcgaattggtcccttttcctcgaaaattacttctggccggggcggaattccattggatagttttggtatatgtacgccgttcattggcaaacagaacctgatttcctatgaggaatctggaagtgaacgatgttctatcttccgagatatgcaggcgtccttcggtgcgatttcgctgcttcttgaggtgaccaggaagagaagagctggagtcagagacatagctggccaacaactcggaccttggcgtcccgggagggccagatgaatcccttatgttgtcaaatactccatctttgggctccatctgcagtcgtgctgaccatccacagtatctgccatgattcctttgtcgatggagtgatttaggtacttttgtgtgcatcgagccttttggctccgctagctcatattggaaatcttcatgttgcatgacagattggatctgacatgagatagcctgagatccctcaccacgcgaccatggtatcgatcctcggatctggtaagatttattctgtcggtatggtaatgattggacctgatggaacggcatcggtgcacgggtagctggctttgctgcattattgcgagaattgaacaagggttggtcatcagaactgccatcatttggctgcagcgggcccctgaggagttcctcgagaatcgaacgagtgataattggttgattgttgaccaacgaagatttccgtggcagggttggtcccggtttgtcttcttgagcttgcggccgcacagaggccggcgctggaacagtctggggcattgagacacgttccttcaaagctccatggcatttaggccgcgaacaaggattccagatttcatcggcggtcggagaatcatcatagctcttgagccaatctggtagccaacgaaatcttttcggttcttgacggtgcttttgcttttccacgtcgccaggatcccaccaaatccaagtatagtcgtctcgagccgatttccacgtcatcaacttccaaatctgactgaagaagtcatgaattacccttttgtttctctcgtgtgtcggacgcttaacccagccataccatgtgcgtgcgtatcgggtgtttgtatttttgcctgctctcaacaccttgcttcgattgaatcgtctgatgaaccccccaaccttccaaaacacgacagcgattatgaatattccaacagttccagcaaatagctcaaagaatactacagagtcaatttccttatggactttgaccggtgtgtttggaggtcgtgcgggaagacgtgggataccgggactcagggagtgactttgtcgagtggctagtggcgccatttattgaagacctagatatactctccaagaatcagtaaagatatagagcacaaagtgtcgtcgggactgtcttctcgcaatgtgcaaatgagagatgttgtagagacgaggaagtaacaaggcatggaactttcctcccatatcgtacttggatttgttctgtatatattcgtcatagccattcctattttagatctttcttcctgtaatgaaaatgtaatggcaaattgtgaaatacatattctacaatgcttgaggttccatgtctatctacaccgagctatttgcggttcattcaagtcacgatccatcaagaacaaaaatataaacgtcgatatttactatttaaacatgagaaaccgcgtcatggttagactctttgattcacctcgatattcctagccaaatcagacgcatggattgaaccaccctagatacatccctcccaatatgtattgccgttcattgcattctcgggaagcgggtcacctatactttcatatatggaaagcatacagttattcctaggcagcataagttcattgtcgcaagggctgtgaacaagcgtcaacacagaacatcctattttgatacggggatcaaaagccaatgcagtcagcttcgccagaatccaacgtttttagatcctgctgagtcatgtttaactggttctattagctctcaaatgctatgtgaagaatagaagatcatcgacctccagttgtatatttgtgtggatgtatcaatttgggttgtctcatgctgttatggaatcatctcatgactcaacctcggttcccagctgagatgaaaccactcaagagggtatgctgttatgggtaaataatatttcaaagttgacatgggatgcaaattcaatctagtggttgctctccactgaagtggagaaggttagcgttcaaatggcaatgtctcaatagtcaggatttcttacctacgtagcttgtcctgtacttttagcaagcacctgctcctactactttcggttctaccgattaatagagaacaatagtacatagaggttgtccagatatgtgggtggtagtttgacccacattcatgcataactcgttcattgaagttcagcctcacactttcacttctttaccgtctgtctaagtcggatagaagtctagacaaatacctctgagtggcaaaatactctatcagtgacgcaacaaagctccaaattagacaaatcagactccctttcacatgccaatctcggggatcggcgatatatatctcggaagaacctaggaaatcgtcagccattccagttaggaagtgctcggttgatatgcactttccaaattaggaaagaacccgatccacagccacaccgatcccgccactccttgctgttccagccacagatcagccacgctcgagccacttacggctgatatggtggcggtgcgagctattggctttgtttctccctattttgcttttgttgggcttcagtttctgcatcttcgtatattttaccttttccagttcggatatgtttttttcgggccaacatgatgatgagtctattttgctcagtgtctcacttccccaacacttggggtcggactttattctgcatgcgcctgcgtcacaatcttctgcctgaggattggacctctaaaagcaagaatagctcattttccagtatagtatttgtcccgctgctcctgcggggcgtcgactgatctaaattattggtgagatcgtcgggacgatcgcccagctcttgaaggatatcatagggtcacggagaaatggcttaagcttttatggggtttccttagatctcaaaccagttccctggcatacacatggcatctctatcaaaagccgagtcttggctgggtcagtgaggctgatttatgcattttgtcaagtgttctatgctagtttgccagttcgcccggctgtaattccagacctctgttgtacatcggttaggcaacaacgttattagaaggtgaaaattctcacaggtcttaaaaatggtagaattcgatagcacaaaatagccttaggggttcgagttcgaggttggatatgtcggtgtttccgagtggcgaacaccatgtccacttgactccaccgccacaagttcaccgttagggtgtggcttgaattgctgattaaaggggctagacaaagcctgcaattgcggtctgatgttctcctttcatccgactaggtaggtacctccataacctacctactatgtttatgtgtacgaccacgatgaccacgagaccacgttgcccacgatgagatacttgcatactagtgatgcgccacatctaacaaaggtccagccatgacaccttacgattcaccagatgctaggaaccgagataccagacaccgacgctacgataaggacgaaaggacgaagggacgttgtaacttgtgcatcaaccctctccttgatccgtgcacggaactattgagaaggcctcaaggtaccagcccattatctcgaggtcccgtatctcaattcacaactcgtatccttgcacatgaacgtcagccgtgcatgccaagccgtttccctgtcagattgtaaggtttccgcatgcgcgaaaggactaaaccagaagctctaaattgcacagatcatggtggaacccctattgtgaggaaacccggggtcgatcctgacactagcttcagatctcctgcggtacatcttcgatctcacagatctctgacctgctccacacctgatatctcactagtacgcgtacccatcgatcagcccaaacttgaactaagttctatggagtccacactcgccccactcgattccgttccggaacgtgctgttgcaaggatcttgcagtatgccgagcagaccttttattgagctcacaaatgttttccttggctatcccaggtacctggtcatcgaccatgccgaggctaatcgtgtacttttgaatggtggcggcatttccgtggccccatcgtgaattaccacaagattgaggttatgggtccgaagtatgtgcgttactgatcttcggcgagtgccatgaggtatatgaagccctgagtacggctatttatacttcatctgattctcatattcatccatatcatcaatcattcttcctattattcttggctctcttttatccaattcttcttgaattatacttcacggttagttacagttccacgacatctccccttacttctcaatcggattgaagcggatcttcgagctttaatctttttttttttcatcaacgattcatccaacgcaattcgtctgttccaaagcactataccgtctacaaaaacgaaaatggccggccatgaattcacgctgtccttcgagactactcccccaacagccaccaagcccggttctcccttcacaatcccagtagtcattgccgtcaacccaatcgggacacccgcacaaaatgtgcagcaccttgtcgtgagcgcctccctccgtgacgaggctggcaccggacctgccgccggactgagtgggagtctcacggcaagtgtgcggagtcgaaccgataacgcaatgagcggatatgcaaaactcagcccgctcactatctcgcagccaggcaagttccggctgcgggtaatgcttagcgcggcttcgtacaacggtgttgtaacgaaggagtatgttgattcgacaataatccatgtgcacgccggtgcggctgctgcccaacggccaagtgggtcaatcctctttcttgcttttggtcgtttttgctttgttgcgggtccctcttcccttcttttcccttcttttctgactgcccctctcccgccatggcgtttttctcttcagggccaatgttcagcccctcctgctcgcctgtttcggactcttgctgacactcaaaactctagctcccactcaggtggcacgactccaacggctcacggctgaaaacttggatatctccacggcggacattgcagcatggcagcatgcatgactgaaggacatatagcattcttcctttttttttttttttttgctggggaatctcgggcgttattcatggtagcctgtggctgtacctgaacctggaaagatattttcttttaccacgtggaagaaatgcaaatccatcaactagtctcgggtgctctatatccactttttctctgatattttctttatgcatactcgctatacgttctctctattggatgattttaccaccgactatctttggtcacggaagaattttcctgactttccctctatctgttagcgcatacgctaacccaagccggaccaaatgttaatctctcttgatctaggcaaagtttgtagtttagttgcattaatccggggctttggcaaacctcgagcttgcatcccaacttcgcatcacctcatctttgggtcatgagaatcacttagaacggtgttctcgcttcgagtgaatccattactctggttatcatggttccccttgaaagacttggatgagaaaatcacccgctatatcacaacgtgtcaaactcaaaatggggcttgagatatctccaatctagacatgagcatccgctgtgtggaatcaaatagacagaatggatcccggtggcgcaagtgtttagttgaattcttacggggattaaatgagcggggcaaatacctaaatccataataccgagtctcgtgtacgaagcagccactgggttgcctgggcgaagatatatattcccatcatctctaaattacaaaaaaagaacaaaagaaactacaaggaaaaggcaacgagttagaaatctagtccacacatccggatattccattcctactctatctatacccactaggtagatcggctccatggcctatttaagtaatactcatccatgtaactactacatagtagtggggattgatccttttcgcgtgattatttagccccggcctagtgatgcaacatggtacagtcacgaaaccggtgtgcaagtggggtgtatggtggatatttgactcttgtctggtttcgaatagacggatgtctcattcaaggagacccgatgttctttaacgggtttacaggtatgttgcagttgctcttagaccaaaatatctaatatgttaaagcacttacaacgtctgtcccttgtggggccgttgctgtcatgggacactctgccgtcctcttgccacatcaggttaggatgacatcctcttagggcttacacaaaattgttcgcaactgcggtagacggctggttattcatattaccaatgaacccacagataacatgtatgaaggtgagacggagagaccgacaaatcccgcacagctcaatatggggacatcgtgatactattctcactagaatctacggctgtacaatagcctatacggacgtgtgatccttcgcggagccccactgctgactacaatatattaccagagtgcttttattccctgggtacaaagtggaatgtacggtgggattccggcgaataatgcggttgcgtcaagacatatcacaccgcatgtagtgggctatcatataaaaggtataatttaggtaaaccggcaacaaagcgatggtcatcaatcccgaatacgaattcctaccttgatcggtcactattccctactgattcctagcgcaagtctttagatcccatacccctgcaattaagcataccacaagaatccaactcgactggaataagctacaatggttggttctgggtgactcgtcgttgcattcgagaatgataatccggggtacgccgaagtctattatcttgtgaactacagtttcagatcctgatttatgaattgccacattgcctagtatccgagtcagagtttggcggtgcattctgtagagcacaagtcggagataccggagttagtggcctctgtttcggctgagtctgaattcgcttgtgcgaatattacaagagttctttgtataagcaggatgattcgagaatttcagacacgatattgttctaaggttagggcaaaaagttcttaatataggactttgtacatatgaggtggtatctgtatctcttcggtgaatatcggagcaagaggttcggtgggaaattgaacttcttctccactcctattgattctttcgcatctaccccagatttcatggatatagccactcaatcaacagttgaacagtatgggaattatctggtcgcagattttcccacccccgcctactctgaccgaggtcaatctccccagccaggatggcaaagtgttcattgtaacaggaggctactctggagttggcttccatatatgcagaattctttatcgcgtaggaggaacagtttatcttgccggtcggtctgaagaaaaggcattggaagcgattgcgaagatcaaaagcttgtgtaccccgacccccccagagggtaacataatttttctccctctatcactggatgacctgacatccatcaagcctgcagtgaagagatttgtcgccgctgaatctcgcctggatgttttattcaacaacgctggcatctccagccctcctcgggggacttcgtctcagggccacgatctgcaattcgcaactaattgtctcgggccacatctcttcactcaacttcttttaccgatactacggcacacggctggagctacacctgtcgctagtgtaagggttatctggacagcatcgattgtcgttgatgcattcgcgctcgagactgggatagaccttgcagaactattgcagaaagacgcggagaaatcacgaaattacctcaacacgaagatcggaaactggtttttggcagatgccctcgcaaaccagattggtgcagatgggatattaagtctggtgcagaacccagggaatatcaagacaaacatcatgcgccatagtcaggcttttgttccttttgttcttggaccgtttctttatgccccgaggttcggggcatatactgcaatttggtcggctttttctagggatctaaaaattgatgatgggggaaagtatatcttgccctgggggcggatacatccgtgtccaagatatgatttattgcgagctatgaaaggagaagaagaagggggaaccggcgttgcagcagcgtttgtaaagtattgtgactgtcagattgaagcgtttctttagttgctttatacttctttgaacttggagatgtttggggggtggtgagagaggagcatccattgcatggcgccaaggacataccccaaatggtagggtgcatgacaactgcttatcttgacgtacttttgctccaagtttctaaccctcttagtagtctccgatctttggagtcatcagctttattccagaatcatcgtattgaggagataccacccttgacgtgttggagcggacatgaagccaattgctcagccccagctaaaccatccttttatgtactagctttgctgacggactcaccaggtgactcactcagacattcttggcgagtttttcggttagcacggcattctagaagggcgctagaagggggtttatgctgatatgattggcgaagaaacgaagttgggggcacggagtcataaaggcttcgtatttcgcattcttgtttaatattaatcttaaccccgcggaaggacccacccgggcggaacgacgaactcactgctccgagaggaatcggacatggaagactcacgacttttggttttgagtggtgtatggtgatgtacacaccgaccagaaaggacagactgtagacgtgtccgtccgaatgtgggatgtggatagtggaaaaacaagccccgaggtgccaaaagattgtcaagcggtgaatctgcggggtccagggagcgggaagaggaggctccaaggcaggaacgactgttgattggctggtgggcgggcaatagggcactttggcccccggaaccttccaaactcaccgacaacaaacaaccaccctaaaccttactagtggagctgacaacgtgctactttcgactgtgattggtggagatgttgaggagtccgtcgccaagccctgtggcatgaagttgattggttgcgtctctactagagcggattcctctgtccgtatttgacatcatagcgactagaaccttggaaggttgtactttttgctgcattttggttggttgccctacggagtccccgatatcccaaccgggaatttacttgggtgtctgaaagaacataaataaaccccttccgcaggcttcttgacttctatttctcatcctctacttcatatcccaagtgatgcacactcaatccaacatctatcctaagagatcgctctcccaaacatcaactacctcaacctcctctcatactacccagttctctgagaagagtcattccaaactgtccaatcctctctcaattctcttccgatccaagtctcctgcaccgattgatatccccaagggccaaggcacaatgtcaatgtcacagcctcgagatatcccgcagcgcaatcgcaaaccttcatacttcccggatcaaggctacacctcagtcagcccccagatgtctgctagcatgggttcgccgaaggcgggctaccctaagcgcgcatctactcacacccggaagaacagcgatgactacaaacgttacagtggaactgtcaaccactacggtcgtcactcgaatgactggctattcggtggcttcagtgttcgcgagacgttccgtgatagcctcgataggcttcgcggccaggacaaggagagctgaatgaatgctcctgctcagcaatctcaaatacgtcccaatatatggaacctcctgtcggaactactctgtttggatcaccctcgggttcacatccgatcacatgatgacgcctactccgaccgttcagcgagaatcaatacctgatccgccatgatttgaaagctgttttgcttcaaggtcctggaaccgagcgtggtccgccctataggggtgtgactatactcggtcgttaaccaccgcgtccgctatttacgcattagcgaatcctctgtgatcatgcttcgtttttgccacgagcccctgctctcgatacgtgtggccgtgcggtacttaaattataccagttactcttggtgttctcccgggtcttgaaactttgatcattcccatcgtgttttgaattgtgttatcgaccgttttgcgatcgattctgttgtgaaatgaacagactcagccgcgtttttttttattgaaactttatcgaatgaaatttatatatcatgaagcgtggaattttacagaacagaagtaacgtagataagcacagcatcaattctagttagcgagatgatatgaggatatataaagtgtaaatgaagtcttagttgcaaggttacttcgtgtcaatcttagtaagaatcttcaagtatgcttaaagaagataatttactttggtgatatggcttttttatttttgtagttaatttgagagtttagcgaccaagatgtcgtacgtgtgtaccttttgcatatgttgtggattgaagatgttcggtaaaagtctggcttataataacaaagatggctaacctccctatcaaccagccaagtggccgagcagtaactcggccatcgcattcttccttggtctagtggtgatgatttccgcttgtcattaaaaccgataagcgcgggagaccggggttcgattccccgagggagagatttctttttttttttttcggtttagacttgtttcattaagcttacattgaacaatggatgggagcttctattacgcatagaactgacgcatttaggctgacttatgatggccatattttcagcaagaaaaacaaaaagccccaacgtttcttcaggcagaagtgcgcgatgcgagataaagtgagacactaacggcgaggctcgggcaatgtgatttgtgttttgccactggagcctagactaggccaagggtccaatgtttatttaaagcataacaatgtctgccgtttacttctaacacaacacttgccggcaaaaatcatggacttcttgtcttctctccgtagctcaatgcctaggctgttcgagggcagcgacgggccccccgagccggaagatcctctttctccgctccacgcggcagttgatgcagaagatgtggaccaggtgcgccaattggcggtcactgcggaccctgccgatctgactgtcgctctatctcgatgctgccaatctggtaaaatagccagcgcccaggctctgcttgaaaccgggcgatgtgatatcaacgcgtcggtggagggagacacacttttattcttggcctcgaagaaagccgacttggccatagtcaagctcctacttcagtatggggccgatgccacaatcagatccaagaacgggcggttcggagacaagcccccggctttcacacctctccatggcgtggcagatagtctgcatccctacgaaaagttggaagacctgccccgctacgaagaactgatgcagatactgctggatgctggatgcgaaatcaatgcacaggatgcccacggaaataccgcactactgctctctgtccaccgtgaggtagccctgattctatttctcttgcaacatggtgcggacccaaatatcgcagaagaccggggaggcacatctgcgcatttcttccaccaccccctggaccacccagagtggttcaaggccctgatggcgaatggagcccgcctggatattgtgcgaagtggagatggctacacaccgctgcatgcctatgcatctaaatgtcagctgggcgatctgtccttgttcaagccctttgtattggattggtcgatcactgacgacaatggcaacacgcttcttcatatcgccgccgcgaaacatcggcacgggagcaagaccatagcggaactgctgaatgttggcattgatccgaaccagaggaaccataaagggcaactgcctattcacatggttgaggggtctgaacaagatatccaggatgtattggacattctctgcgcaggcggtggagatctcgaggctaaagactatcgcggatgtactctgctcaccaaggccatgcgcggcaccccgcagtggaattgtcgcgagcttcttccgtatttcatcagccgcggagccaatatcaacgcgcaggatcacaaagggaacggggtactatcttatctgattgaaccatatcaattccgagatgagtacttggactttctactgtcccttggagcagatccaaaaatggtaaattacgaaggagactcgttcctgcaccatctcgcagccaattttgcgaccatcagcgaagacacggctcttttagccatgataaaactcatgaaaatgggcgtctccccgacccttcccaatttccgaggtcggacgcctctgcatatgctatgcagtcaatcttcagactatttattcgcggcaaccgcagaaggaggcaaatatgctatcgacttactcctagatgcgggtctcggtgccgcactaaacttgagtgatcaccagggaattcgacctatccaccttgctaccacggtttcggagcaactggtcggtaaactgctcgcgcgcggggctgatgccacagtttcaacgaaggatggccgcaatttgttgcatattgcgtcaaccgcgcgtcaaagtaactgcgttgggctggtcttggaccactgcaaccccaaggagttggattcaatgctcaatacacgatcggaagatgggagaacgccgttgcatgtggcctgtcgctctggaagactggagacagtgaatcttctcctcgcatacggagcagatgtcaacatcgaggacaagcacaaccgtacccctctggatgcatgcgccgagtccattgccgaagaccagctctggcagggggctgacgaccaacagaacatgatgaatacgcgctccgcggcaggtattttggtagatgacaatcaccggccgacgcagcccacatccaatatgaaaaaaacatataaccccaaacgtctgggatggaaaggagaaatcacatctgaaagttcgacgatcggaatcggacaaatcgtacgagcaatggcgtcccacggagctttggcgcatgaaaaatcttttggcgttagtcccatgcattatgcggtagccgagggaaatgaagaaatggtcgtggaattggaccgggtgttacgagaaatgagcattgaggtgaaggattttagccctctccagacagaattctatctgctgcgctcccagcacctcccagaccttctcgggaaacaattcagggagtatgtttctgaaaccaatgtgctaccaatgatcttgctcggccagcaacaggaggttgcacaggcggtggagaagagtgcttctgttatcgaggataaatctgccatgccagcgctcatgtcctccctcgcgagatggggattttcggagctctttggccggattgggagtacgatgtctggcaattgggtcaacggcggctataccaatttccggggccaaaagtcgaccccatatctcctggcagctggtcagcgagaccttcccaacctagatgttattcagctgatggttgagaagttcaacgcggatgttaacatcagatttgaagcgggtatggttgataaacccactgtacactaccaatcaacgatggcactggatcgacattacaagccgggtgacacgatccttcatcaactggcccaaggcatacattggtggcatgaaggagccatccagtacctcctgaaacatggagcggaccccaatgcccaaaatgatcaaggcaagacgcctctatgcaatgcagttgcacggggagagctgggtggccaccgccagctcaaaatcaccagaatcttgctggagggcggtgccgatcctaacatcactgcggcgtgtggctatacccctctggctatgtcggcgcatgacaccgagttgttccaattactgatcgaacatggagcatacccttcccaggaacaccccatggaactattcgttgcattgtatagtttcaacgaagacgctgtctccgctcttttggacatggacctagactgcaacacgactgtattatccgacgcgcagccacattggcacacccaccgtttccaaaaagttccggcaacgcacgggctcatcttgagtcctcttctctacatctcaatggtaccatttaacgaggccaactcccgcgaccaagcctgcaggatgattaaactactggttgaacgcggggccgatcccttcctgccttgccacgagaaccaaacgattctacacgagatcttcgccagcggaggaattatccaaccatggctcgacatgcccaacctcgacctcgcacaacgcgaccatgcaggaagaactctgctcctggcagcggccagctgtctgactggaaccgactcgtacgcctgcacggtctcggcgtatccattccgaggtggacgccttggcccggcgccctggaaggagggcgaccccacgcgtgcaatgaccttgtatgaacgaggagcggatttgagtgcaatagattacgagggaaacaatgtactgcattatctggctgaccttgactgctccaatgatcactttgcgtcgattgaagttcgacggacattggcgttgtttgtggaaaaagccccgcagttggtgcatcggaccaacgtgcatgggcagacaccctggtcgatcgccgaggagaagaatttcgtggggtttatggagattttgcagacggataatgtgcacgcggaatgatagtcgcgggtgtcattatctgaaatatgtggctactggggaaggtggtcgggttgtccaatgcaatgtgacagtaacggcccacggcgtacggagtacatcatgcatgttctgtacataatataatttcaaggttcacttctacaatatatacacttagagtgcactgacaagcgaactgcaatgttgtaagaagaatatctgccatttgcagggataccgccttccatattcagaatcaggggtcaatctaaaaatattcaaatgacgtcagcccccactcttgctagccggacctccgcccagggtggtaagcaataccaagcttccctaggtctctcctgcattttcctcgatagctgttaaagatgagccatggatcacaaatgccagggcagttggaggatgagagcaatgacctcactcagaccccgccggagagtggccctctccaaacactgagtccgagaccgccacccaacactcaatggaaggcatcgtcgcggcaagtagaggagactcttgctaagggcctgtccaatgaggacctttggatgttgatccgccgattcgacaaggttggtgtaatctctggttgtcgagaataattgctgacatgtgaccagcaaatctaccatgtgaaagcggttcgtgatactgctgctttgaacttggatctcaatcgcactgaaaatgagaagtttccgccggaaaagctgcgcatgacgcttgagaggttttatatttccgtggttgtcggagtgaccgagttcatccgccatatcactcgcttgcgatcatggaaggaaccagcgagaacgacaatgttctgcacggtatgtggattacgaacagccagattctgtacaagatattaataatttgcagggctacttcgttgcttgggccctggatctcttagttccaaccattatgggtcttgtcgtagctttaataatggttccgcctgttcggctattattattccctgggctggcaagagccgatggcccaaatggaaaaaattcaaaaggaggacaagtacaatccgaagatagcctcacgggtgcccctgaaacccacaagggtgaaaccgctgaacaagaagccaaaaatatggttgacagctttgccactgttgctatggagagtgcggcggccaaatatggtcaaacggttacagacgactcatccgacgggcctgcgctcattgaaagcttagaagctgtagaggctgcagccgaaaccccggccggcgattctcctgaagacaaaaccaagaaacccatgaaaaagaaggtatcacatgcgactgataatgtcatgcgtatgctgagcgatattactgatacgtatgagaaattcgccaagtgagtcaattctggaaggatatatgaacacatactaatggtacaacagcatcctttctccaacacctccgttccttttggttacatctagactccgacttgcgggcatctttaccctggtgtctgttattgtatcattcacatctagttattggatcatcaagataatcggcttcgcacttggactgggtttctttggagacccaatattcacctacacccttgatatgctggacagaaaagtaccaaactggagagaccagctcgatttaaataagtatgatagctctcatttctttctttattacgttgctgactcggctacaggacacttttggctggcgttcccacaaatgcacagctcactttgaccctgcttcgaattggcgaaattaattcttcgccattaccacccgccccgtcatctgatgataacgagccggtatggcccctgcgccgtaaaaagtcacaggcagcgagctctaccgacgtcagcaggcaaggatcatccgtggaccttccgtcgacggtctccaccacatcgctttcagaaaccaaggtgccaaagaagaaattcgtgttcaggctcttcaaattcttccgccgcacaattgccacggcaatcaaggggcatatcgcctttgaccgggctattgccatcgcagggtcagcacataccaagaatttgcttagcatgctgcaaaatgggcactttgcctcaacgcctctggggcccttgaagttcgatgcgaagttcgaacgtaagagaggcgcagcagtcattgactcgtcgaaggagcctcctatcttgtattttaccacatatcaatccgccgggctggatgatttacgcatagaaagtaggaagaagggatctgttctgttccagattcctgtcaccgaaatcaaagagctgaagaagacggagggactagggtggaaggggaaattgatcgttgaattgacggctgggagcaaggaggctgcagatgggctggttgttagcggtgatgagctgggccagtcttatcatcttactggtatgagatcacggaaccaactgttcaatcggttggttgctatggatgctcagttctgggaaagtcgttgatacttctcgtgcataagtgtctagctccgctgtacatactgcaggtctatttagagtttaatgacatattttatgtacttaactacgattctgacttgaaacctcaggtagaactgtggtcgtacggcatggaacgctgtcgtcaaatattttccgcctgaatggccttttttttatcacatcccgagagcttccattttttgagaattattattagagtcctataagaaaaaaagtggtccttcaaggagtaattttgaaatggtgtattcaatctgattagatgagagatttccataggattcataggaacttcggcaactgctgcccttgtaacacagccagaaactcgtctcggtctttgaaccatctcgatatagattagcacagtaggaagagttacgaaaggagaagctacacttaccttcacttgtttgaaaggaaattgacatggcaccctctttgtttttgacaatgggattcttagaactccgagccataacattcatcatgtcaagtgtcgtaccacgcatgtatggaagacgcggaagggtgagtcgggtattctcttttgagcaatcaatgaactccgacggaacagccatagtaagccacttatccggcacggactcatcccaccgtgcggcaagttgaaaagctgttcctcggcgccatagttggatatcggcgctgcgcttggtggacatttggaacccaaagagcgagttacctttcgttgatagggactggatccgccgggaatagaggagttcgtatagaggagagagggagctgaggaatgagcgggctacagggtcgtttccaaactcgatggttgtttcactggtcttcttgtcagagtgggagaatgtgacggggccttctggatggtagagctggtcaacgtgagttgagatgtagtctgtgcagtagatgcgggggaaatggatgctgaacgaggagtggtcgtatatatagtcggcgtcacggtaaatatagtacaaatctgaatatcgccatggtgcacgagttcggaatactagcacggctttgtattgcttgtgctcagtgccagtatcaaccacattgtagataagtccggagctgctgggttgtgaccaggaaaaattcggatggaaattcatctctaggacggctttttcaaaatcttccgcttcttgatgtgagtggaattgtagaccgacaccgatatttggtgctgtctcgtcatacacataagagtgcaaggggttgtaattgccatcagtcttgtcagatcgcacctggcatgtgtcggaccactgcaagaccacttgacgggacatatttcctcggctgatctgaactgcactgagaggcataaaaagttccatcgttcgtggggccttctcagcagcagaggaagtgatcactatgcgtcggatagaccgccaggcttctctaaaagatcgttccagaatgcgcacctcgcaggatttcaccataacaggcggattcattggtttcatggttggcgtgttcagctgctcgaagatatcccccgaggtcttgaaaataacgctctcggtaaattcggttgaatcaaatggttctctttgccatacggcgtcaaaataagcctttgggatattgatgaactgtgctaggtctctatcaaactggaaggatatcgaaacgctcatattatcaaatttgaatggcacaggttctgagactctagcgccagggaagccagtcaaatatgcatttgataattgtacaaggggcgacagatcatctagtacgactaataacggttagttttataagagggtattatgagaatcgtcacttacagtctcgttcaaggcacagagtgccactttggttgcaaaggacaatctttggctcgctttcaccttcccgtgttaccagcaagagcatgtagggagcacccttggtgcgcatgcgaaaccttttgcccccgatgcaggcgttgacaaaggtgcggtagagaaccttttcctgttcgttacctgcatcctctaggtcgacagcgatccagcgcaaattatccaaaccaagatctagattaatgctgccattccaagtttcctccggctgcatgggctcccaaatgtcaaggttttgggcatgtagatgcgacggttcggggatgtcgacggaagtatattgggaaagctcctcgttaatgccctatattgaattagcgacagattgaagtaatcataccacggcaccgacttcagaaagctcaacaattgacttgcgatcctcgtcaaccaaaagagcaggagagggctcttcctccagaacgatatcgtacagaatatatgaagccttgagcagatcaagataagcttggtgactaggcgatctcgattccatggagggactcagactgccacgggcgctgacatagttatgtctgttgcaattcgccaaagtcgtgcgcgccttgataactgttagtaaatattgcacctatttgttctacacgagctcactttcaacaaccaccaagttgccacgcgcaaccaatctcttgtggctagccttataatctgcaacccgtcattgactgatgccttgaatgttttcaatgtttccgcagttggtctatgcaatttattctgcggctcaaaccgtattggccttgagatatgctcctggtgccgaacatcacgaagatgttgcatagcgggcgtcacagcctcgataatgtgaggagagccatattcatcatcagagtaggatcgagtttgctgtacgacttgctcctccgcctggtcggagttgttcgcccatatcccatcatcgagtgtcccgccgtcaatcgagccgccaaagagaagttgctcactgcgcattcgggtatgatttatgcggccccaagtaggtacaaatggcgacgtgttcaaggttaaccaggaagttggcgaggtatcatcgaggggcgactcatccgattcagttatcgacgatttggaggatgtagacgtatgtttgaccttgctgctactgcccactgagcttctgttattagccaactccaacattttggcgcgaacttcctcgattatatccatttcgcatttttcttcgttgttagctggtagctccacgatgccctggccagggctcatcggcgagacaacggagtctgtatcccgaacaggtgatgccgctgtactgagaacgatctgctcatcttctcccgtcgccagaacaattgttttctctatgcgagcaagcgagggtctagacaaattagaccatgggcctggatctgggacaatcaaagcagacttacttccctatagagctcatatattggctcagattgcaggtgtgtaccgtgatttcggatctgagatcctcaatctgagttcgttgtgtcacccacttgatcttttgccagaaaccctttccatctccagtttcgaagcccttaagccgggaaaggagctcttttagtcgctgtagggtcgcgaagcacgcaccgagggatcgttcaaacgtctgtttgcaattttcatccatcttctcaagaaatgatgccttgaaatccacattgtcaacaaaggtgcgtaaggtgccctgtaaggagcccagctcagtcgccagcttttgaaatcctgcgggggcatctttcgcaatgatctggcattggctgtataggtcccatgtcaccttggcgagggcagggatctcgataactccgagacttgaaggcatccttgacaaaaggaattcacctcgatgagactagatttttttgagagagaacggacacgaagctgtgagaggtgcggctttccgcagtcatgatccacaagactatgtaaacaaaatgtctttcaatggatacgagctgagccaggcagtaaaatataataaagcgtttcccggggacaggccgaacattgcttagccattctagtcacccatgaaagagacagcctcgaatgataacccgccaagcgttccgagctaatatgaagatcgactattcgatggctgctcccaataggtacttattccgagtcagagattggcacggcatatgctttggcaaaccgaatcaatggtatgaatgagtatcggtggggaacgcagacggcctttccaaaatgcatatttctttgacaatgcgccgctaggctctgtgtgtgctgcaaccaaacaaagaagtgcagtaaaagtggcgtcggataaccgaaagctggactgcaactatgcaaacgatctagcagccagaggattatttgattttctcccagattggtgtgttccgtcttgggtaggacatgaagttggacgcatggaagccgtccacttattccctgcagtttgctgtcaaggtagttcaaacgaaatcaaacattgcaatatgcaatcagctgcaaggatattgctttccaatgacaaaggaaatataaatataactcctccgtactctgcgagctctcagagatcgacatctgcgacccactttctgcctgaggcgccaacttttgatcgtcgcgacagctcagcccctaattttttattttcgttcctatcagacacctcatccagctctcaattgattccacaaagcatgaagtacatcggaaagtgttgatttcactaggccgagacatctacaagcttgcctaccattatagagcctcacacgatatccaattaatcaatccaccatggcgtccaccgcgtccttcaccttagacgccacgacagtcctctgtatcgtattctcactttctatgatgccaattgcgtacattttgagcaagacacttgtcccagcccacaggacacgcgatcgtgtcctcttcttctggcacgcctatgatgctctcacccacatcttcatcgaaggctccttcctctacgaatgcttcttcagctataccactgtcactgggaatcataacgtggagcccttcttcctcaatgaccccactcgtgtctacggtcccgcctatgggagtggacctgcgtcacgtttgtggcaggaatacgccaaggctgaccgccgctgggctggcgctgatttgactgtcgtctcgctggagttattgaccgtcttcctcggtggtccggctgcaatatacatctgctatctgctgtgccagtcgtcaaatgagaagatcagtgccagatcccggggcggtgttaaggcaacgctgtggctggtttcaacagtgctggctacggcggagttgtatggtggattcatgacctttgcaccggagtggctgacgggaagctcgcagctggctaccgaggatccggtttacctttggctgtacttgttctttttcaacaccctctgggtctttatccctctgtgggtgctgtgggaggcagcgaaggagctacgcggtgcctttgtggcggcagagtcccagaatgagaggaaatctcagtgagctcggtccgagggtgggtgttgtcggaagtctgcatgaacttacgcctgaagcctgttctcttctttttctttttcggaaatcttgatacacatcaggtacaaaatgaggccgaattgtcgccacctttaggattgtgatgaaatagaataagatagattcctattatctcccaagcattaccggctgtctattgataatagtaaagaatattcacgttggcttgttgcatggtacttaggtacctagaatccctgaggtgccattgttgtggaatggaacaaccaccattcaactcaaggttcggcgggcttatggtgcaagtgagcggctttgagatttatcacttcagtctacactctaaccatttgattttagacattcattcccgtgtgggtagagcaaatatgctccaaactacgcattgtccgaatgggcttcgacgctgaacaagcattgtatcgcggcttctctcctaatgcatatcactcaaggtgcatctgcatatatcaaaagcctctgggcctagactgccgatcaaaattttgatattgttccacaagatcagttagtactgtactctgctcgtggtattctcgtcgagagctttggtcccacatcgctctatggtactgcttcactgactgttgaggaccgcagcaaggaccctgatgactttgcacctctgactaggtctatactacgacctagggagcattgcactttcctatttctagctgtgaaccatcactatcagctgatttttgcaatatgggattgcaggtcgggcatacttcactggcccaatcaagggccgtggcttggtccgctcgaattcaaccactcgcatatagtctgtggtagctacaagcactgccttggtccttggaagctagaaggattgtatgcactcggtctatgtacggtggtgatgttggcaagtggttttctccaatgcttctaatgagacatcaagttccgttgtgattgatatagccatcagatcaggttatcgtaaataggaatggaaatattctatttggatttaaaacgaatgacccaacttgataatccatgccatatctgaaataatcatacttgttcctatacgaaagccccattgtcggatgttcaatgtgagtgcaatcaagtttgtacgtcgacgatgtaaacaatcgcaatggcgagtgactgtgttagggtcaggttgcgcaggtgactgacttgacggccattcatctacaccttccatcctccttttcctttactcctgtttatcactccaccatcactttcttttcatcactcctttccatccttttttcccctttctgtcttcaatcacaagtcagatttcaccaagatggcactcttcataccgatgagtcttgtccctctctgttttccaacccctcctaccccaaagacggaattccaaaccctaccagcagaaatcaagcttctcatcattgaccagcttgatcgtgacacctacacactgagccatctagctgcctgcaacagggagctttataacatggcgatccctgcactgtacgccaatgtgtctttgggagctgtccctcattaccggatgtggcccggtttggcatttcccgctgatcgtcgttctgtaacttcctctcttccgggaatcaatgttcgctctctcatgacaaataaacagatcgaacgctttcttataacaatcctccgcaagcctcaccttgcagaattcgtgaaatccctcgacgtgaccgacctacacgacctttgcttcgagcacaggcagagtagtactcagagaagacagcttcttcttaatcctctcgctcctcaagaccatcaaatgattatggacgccgccatgaaattacctttgtattcaacaatcagggtggcgatgcgcaaagcccttggttgcgatgtaccccggtcagatgccatggtagctgttcttctggggtacctgcctgccctaaagcacctcgaaatcgcgatggagagtgaagatccgttccgcgaaccgcaaaccacagagttgaaccttattgaacgtgttctgatcagtatcgccggtgcgcgctcggctcagaccgacgaaaatggcatttcaaatgctcttacacctacgctgtctaagctcactcacctgaaggccgaagtcgacggaaaatcgcccatggctgacattgattggctcatgatgcttcttcgaattcccacgttgacccacgtattcggcaccaaatggtccaacgcacaacggtggctgcgacctgtacctggcagttcccatcgcctcgttcaccttgaacttcgcgactgcacttttgacgccctgaatcttcgaagactgctccgacaaacccacatcttggaaaccttcatctacgaacgcgggtggacagaggcaaaagattgggtcgtgaaggctgcggacctcagccaagcgcttcagtacaggtctcacaccctgacctgtcttgaactatcattcaatcgaaccgatagaaagatccacgaagaattgtatctccatcctctcaacctatcggggctttctcatctgaagagactccggatttcggccggctaccttgtccagactgaaacaaaatcggcacactatgaaggtcgtcactggcggttacatgacgtggatggagcatacaacagaaatcttcctttgcacaagctacttccagagtcacttgaggagctacacatcattcaaattctagatgttctcgaattcatgctcttgtgtgagaagctgtgcgcaagtctccagagcagaacagttcccatgtctctggagcctcaccacttcgaatgcctgaaagagatcaaaatcgaggctccctttgagggcgaaggtgagtgtatcttttcggaactctccagagtcacaaaccaggctggagtgaagttgacaacaatcgaaaactccgccgactatgtcaagtcctggattaccggcaaatcgaaaccatcatgtgccgacaagaagattgactgggggtttgacggcgacgtccgatgggcacgtccttttattcagcgaggagtgacacactagtagctcaggggaatgatcatgatgtattggctagccatgtgatgactatttgcgtgctacgcattaggatgatatgagatataccattcgactccgaattagacggttgtacttgcccttcctaatcctcgactatcgcacctgctatatccgtattttccataataggaaggattaataggaaggagtcgctccttcctaatccattaagtaaggactatataaaactaggtcgtaagaacgcatagatagttttccctttctctctctcctctatacttagaatcctagagtaaatatactcttttcctttagattaaactagcatgttacagtgattatagaactataagcaagtaagtaagcaagtaaatagttaaaccacagcgtagccgctgagccggctgcaggccatttaagtaagcaagtaagtaactaagcctccctggggggtggggggtaggttcaaacgcctaaaggcctatatatcgtatataacctgctaggatgttttgtcaaggaatacaacggtccccttcatgggaaccccttgcccatctccgcggactttggaaaaaggggtagcaaaacgccaaggagaccttaaaggcctcggtcgaatcaagccctcttctcgtgtgtgcgtccggctgaaaaggatcaggctctaataaaagaggcacgaaggattgccgggaaacccgcttttggatgcgatgtccgaacagtcgtctctcttcctcccctcctgaaagcagtcgttgccgcggccttgcctaactgattaaaggtccaaaggcaagtcgcgccgctatcaggattgggcttggacaaccttcatgatgtagacttccctcgtcaacctgctgctccctctcgggattgcatcaacggcatctgccacggtgctgctctacccagacagtctgccctcgacactcacttcggagtgcaccgctgccttgactgtcgacgtcacagtctgtgacccgctggtgagggacctccgcctggatattttctacccgcccgcgtcactgacgcgcatctgcaccaccggctgctcatctgcccttgagacatggcgatcgtcggtccagtccgtgtgcgggaaccagacggtcacggtcgatcttgaggttgagaccgcggctgtctatattcccggcgcgctgcagtactactttcagcatgcctgcctcaaggacgacgggggccgtttctgcagaccagtcgcggccctggcagcggtgttttcggatcccggcatcagccctttcaactacatcagcaacgtcacaggccagttgctgcccgacgactgcgatacgtgcctggccgaacggctgcggctgcgcgagggatcgccgtatgacgacggtcccatcgcggccaggatgtcgctgtacaagagcatgacggcgagttgcggcattgcgggacgccccgtcgtaccaacgaccatcggctacttcacggcagcccccgctccgacggccgaggtgtgtgaaggctcgacctacaccatccaggcatcggacgactgctacaccatatccaggagccagggcgtcggcaccaactggctgctggccgacaacaacctggaagtcttttgcaccaacttccctgccgcgggcacctctatctgcattaccaaccagtgcaccactgtcaccgtgcccgtgaatgcgacgtgtgaggccgtggccgcggcggccaacatcaccgaggcgcagctcattgcctaaaaccaggccgtgagtggcgattgcgtgacaaattattggttgggcgaggcgtattatgttggccttagtgcttagataggtagataggagggggtgggataagaattgatcgaagaagttgtcttttgtgcttgttggtgaacagctgtgagcgattgtcgggccttcattgcttgaaattgacatttgaatctgctctattcaaagttaccggccagccgtgttgattcagtacattacctagaaaatttgattctcgtcacagaaagtcctgagggtcttgctccctctcttccacaaactcaagtgctttccacaccatgttgccctccccgtcttgtccgcccacgagatcctcaaacgccctaatgacttcgtcgtccggcctccagtcctcaccgacatgccacgtcacctttcctttcccatctcctccagcagcgggcgcctcatatctcaccccccatcggaacattatcgaaatcccctccacacccgaggaaggaggcacctcatcactcccttcatactcttcggcccgctcattagagggccgccacgtaagccaggtaaacagctcggcgtcttgaagggagggcatattttgccgttgcagagataaggcaaacgctaagagtaaagggttaacgcgctccgcaatagggtgtatacgaaacatgtcgggctggcggagatcgtatatgtccggtgcgtcgtcccagtactcgtccttctcctccgacatcaactcgtgcgtctcgtcgtcattttcctggcccggcgggtagtgctcctctcttgtgatagcgaaacctattgggtagggatcttcccctcgtgggccggaaaagtaccagctgccgtcgggcgcatacggatggaattctatccggaggtaccgcatgcgtatccataacaaagcgtcgctcccagaggggaaaagatcgggggtaataagcgcgcaggtatccagttcctccaggcaacttcctagctcccgcagcccaagagacacagggtctacattattaaactcgttatttatagacgacgacgtaccaataaggtcaggtaactgctccgcttgatccatctcgtcccagcaatacgggtttggcctccagaaccaaagacggaccttggtaagggaggacggcaataagggcatggcttggcgcacaccccgtgcgaactcggcgcggtcgtcgcgccaaggacctgcccagacgcgggaaatgatacgtagtgccttagatgtgaagggaatggggaagtgctccccaagccaggggcagagcagccggcggagctgaggaaggcgggtagcgagatcgaggggggtgcgcatagagacgggtcgcataccaaacggtttcccggtaaacgcctcttcgggtacgatgagcaggtcggtgacgcagttgaggacaggcaggctatccacgttctggacggtgaggcggcgactatggaaggcacggtgcaagcagttgcggtcaccaccccatgcgtcgggatcagactcgattacctggttgccaatgtagatgccgggctgaagacctcgatcagcgtcgatcaaggctggctcgtctggggactgcttggctgccatgtcttcgatctcgtgcagaccgttgaaaaaggcgtgcacttgggctgaaaagtgggcgttgacggcctcgaagtcggcccccggctccctgcacgggagcggcgcgccaggcacgttgaggaggagaggcatttccgcatggagttggcccccgccaaagacaagcgggacgctcccgggctcattgtgggcgcgcatgttttggaggaaggcctggacggtcgcatctttggagggcggcgtgagtacctgaatgtgttgggacgccattgtgaggattgtctcgcaatggtcgcgattggatgattccctagacttaggtgttgggtgatagaggcaacttggaagttgctcgagcagccgcggatgaccagtaaaccaggctccccgacagcaaattaattgagattcacaagacctgttttttttaccgtcccacctcccacaccacttttcctaggcacttgcaatgctcccaagcactctttacatcaacctaccacggtatagggtaggctgttgagggtaaggggcggggtgatcgctttctgccggtttgactgcctatttggatagtagcgatactaggtaccggtgtcgcctaagatatggcgtagtaccggctgccagtgctgctggttaaaactttgatgagaaaaacaaaactagggtccttcatcaaaaaaggagctactcctagatcggaacggacatgctaccagatgatatactggtagctcaggggaatgatcatgatgtattggctagctacggcagcggggtaactagctacagtaaggtcacgtgcacccttccgtgggtaacaaggagcgttgaattccacccgagccgctaagtgtttgaattggagtccggggggaagggggtgggggatgtattgatatggggatcaaacaatgaagtgtatgagaaggttccccttccctttccccttctcacttgaatgtaatgagtacgatgtacgatgtatgtaggaattgaattgactgccttgtggcctgatatgtgcacggaccatttatggccatgatcgacatgatgtaatccatccacatggcccccgggggtagtggacctcggctttaatccaagagatcacgtttgtaacttatgagaatcttgccactgtctgtaattatcatcatttcaattcatatccgaaatacctcactcctgcgcattctgtttgaaacggatattagaggttgaatggcctgatccggctcgtaacaaatcatcaattccccagaagtggatctcgaactcgagtactcgagcaccaacagagccatggccgaatacaaaatatcctacgagtcccaactggtgtgttctaagaacccaatcgcatctatttctcacacatccgcatgtgcatccctatcaggccatactaacatactcacaatcaaggacgtataccacccctcctaccgctacgaagcccatgacccgcgcgactggcaatcagccgctgcccgtggaccagccctcccagccctaggaaatgcaaccgccggtgcagtcggcgcagccatctcgaatgtggtcgtctacccactcaatgtcatcgtcgcccgtctacagacccagaagcagaaggacaccaactcgagcgaaaaatcagaagataataagaataccgacgaaggatataccagcgtggcggacgctgctcgcaaaatatacgcgcaggaaggcatctccgggttctaccccggtctggcgcaggatacttggaagaccgtcgcggattcgttccttttcttccttgcatatagtgcccttcgccagaagaggatagtcgcacgtgtaggtgtagaacgagctgccaagagcaagaatattgttcttccgataatcgacgaacttgccgttgggatattggctggctcgtttgccaagctgttcaccacaccactgtcaaatatcgtcgcgcgcaagcagacggctgcggcgcgcaagggcgggaatgcgaagaacctgtcaaccagtgacatcgcagctcgcatccgctctgagaagggtatcctaggcttttggtctggatactcggccaccctgatactgactttgaatccgtcgctcacgttcttccttaatgaattcctcaaacggaccttcctaccacgctcgaagcgcgacaaatctcatccggctttgacattccttttggcagccctaagtaaggtcgccgcctcgtcaatcacatatccattctccctcgcgaaaaccagagctcaagtaatgagctcgatctccaagcccaagtccgagtctgcggagaagactcgggcctctgttctcgcctctctcacccccgaaatactttccacagtcgccaccatcgcccgcacagatggtatatcaggactctacgccggtctccagggtgaagtgctaaaaggcttcttctcgcacggcttcacaatgctcgtgaaagacgccgtgtacgcgtttataatcaagagctactacctcctgctgttgctgggacatcgctatccttcgcccgacgaacttatccagcgtgcccgcgaacaggcggaggagtattctgagatcgcgcgcgaaggagcgcgtgacttagcagagaggacaagggaaggtgccgaggagctgctgaaggctggttctggcggtaacgctgttgatatgacatcaaacttcgcggacgctgctgatgctgcaaggaatgcggatagcggcatcgatgcttcttcgggtctgaaggattcttcggcgatttctgacgaactcaatgagacggctgagctggtcggcgattatgttgaagacgaagcggccgagtggcggaccctttatcattggttttgggagaaggatcgtggaccgcaccgggattgatttggcaaaaatatagtttttgatgtctacatatttcgcattcttgttacgattagtttcttgttcagtgaggtaaacaatacgaaactcgaccaaacgtccacttagcagatccccatctcagctggctgaattagttacaggacctctccaagtccaagcaactcatctacctcgccccagaacacaatgaagaagacattgcatttttccacgatctcatcaacgaccctataatccaaaccctaagcaccggccgtctcccgcgcccatctcacaaaaagtccgcaagggacttcatcagcggactccaagaccgcattctaggagtagtcatatgtctccctgcacaaaagtcccgcacagaagcaggaaccgaaaccgacccctcgcttctttcctcggcccaaactccagatgcaccagtccaaaattcaaactccaagccagtcccaaccggccacttgagcctttccagcttgaccggactagactacgcgcaccatcgcaatgcagtgataggaatctcaactgcggacgggtaccgcgggaaaggatacggcggcgaggcgattaactgggctttgcattgggcttttcagcatggtggtctgcatagggtttctaaaggcgcgttttcgttcaatcataatgctttgaggctttatcggaggcttggatttgtggatgaagatcgtgagcgggaggctatttattatcggggggcgtgacatgatactgttggtttgtcgatgctggagcatgggtgggaggttttgaggattggggatatggtgctggatcgagctgatcgcgcttgagcgatagtgaaggtttggcttttggtatgttgttgacggtctggttgcttcattttgatcaattcaatatggaagaatttgaagggacatttcttgagatctaacttggaaggattgttatgattggatgatagctgctcaattattcccatttagtagacagtagtttgaagaccattagaccatccatcatcccaaataatactatacaagaaggattgccgtgagaccaaaccccaactacggcggtaccgcaacacgaagatgcgcatcaaccaaatcaaaccaaatccccccaaacccagactccctcgaagccctagccagcttcacaaattcctgcagccgtgctacacacgagatctgaaccgtgaacgaagtcaagcgttccagcaaatcttctccaggcccatatatctcaaacatagccatcgtcaaaggaaacacaaccggcagcgcgctggattccttcacattaaccgctgctttggcaaagaacgataattcagagaatattccatttgcgagtttccacgcggccccatcctcgactcctagcggataccgcagccggtggaggatcaataaggctgctagacggtacacgttcgcttgtgttaccattgcgagaaccgcatgttggccgtagctttcgaatagtccggacggagtttggggccgccagcgtctgatcgtctgctctagcccatccagtcggtcgtgaagggctgtgtgtgcttcagaaccgacaggaggagcttgtatcttcaaggtattgctgcattcgcagatgtcatagaggtgagggaggagtgtcgcgcaaaggccaagatagcggtcaacgatgacgcgacgctgggggtcgagtcgtattatagggatttcacggtgcactaggcactcgaccgtgtcgatcagaatcggggacatggttatcgtgtccatgatcggggcttgcactagtctggggagccatgctttggtcgacatgagggagctccggacgatagagtgcgctgtactggagtatggcgccgtgagtacgtcgaacacgtacatgatctggcccaggaagagagcgcaagctgcgctgtagtcatttgagatttccacgcttcttagacgctgcaagcccttcgctgccttgaacatatcgggctcgctccggcgtataacaggcgacttttggtaattcgacatcagccctaggaaagccaggtatccttcggtcagcaccggggcggataattgcaaaatagcataaacagtcttttgggatcccgggataaaactagatccgaatataaatggcgaatgtatggctgagaattgttccacgtccgtaacagtgcgaagagcatctgatgttgtttggaagttgacgggggcggcgagtaaattctcaggcgatattaccacgacctcggtactgtcgggggtccaaggttcgtcatctctgggagtcgagctcgaagatgaacatggactagaggaggagtatgagagatggctgtcgctgtccttggacttggcgcgctgtcgcgacacagcagtagaaacccgcaaatccccatgttggacgtctttgggagaagtgtggtgtatcatgcgcttggaatgacgagcagtggagccaatcttcagacgattacatctcatgcatgttggactagtacctgcagcacatgtctctttctctttacttgtattgcagtgggcgcaggccttcgacatgattttagcgcgaatcgagggaaatagcaagagaccagttgtaaaatggtttggagcagttcggtcagtttccagatgtcggcgttgtatgaattcagggaggtgtcacggtaagatccgtcggtttccccgctctccccaggatatccagggctgatcggcgtatggacttcctctttgggtattgcgatcagatctcgtttagggccatgaaagatatggagaatagtaggtcagtagtatctcaccgcttcacaatgtctatgggtgataatttcaccctctgccaaaagtactggttgggttgcgcactgaatccccagccaatggaagcgcagacgcgaacgcggactgaatcacgcgatcagcacatagcttgcaaatataccaaggcctcttgatctcgccggctataaccgagctggagaagaataagccatccattgacgaaataaaaatcacattgttagccgccggttcatccataacaaggtcccgagggtgtttgcggttcgcctacactacctatgccccgaaagggcaacccttcgcatggaccggctaccccagaaggtccccggtctctccataaactccactcacgacttcggcacggtagcatggggccgagaggacaccgactcggggacaatattgacttcagcgtcaacatgcatcagtaacatccagactttctgctcggaaccagatggctttttcaacacctacgaaacgatgcaactcaatctcatcgcggtcttcgaaagatctgggccgcagtcttcactgataatgctgcttccggtggctgaagtgcgcgtcatgacagcccatcaagattcaagcctatttgaagcctagccgtgagcattgatgtcatatttcccccacatttaccaaaacagaagttggtcgcaaaccttgtgggcggattcgccaactccgtacataggggtctggaacagactaggaagtgattcgaagatgtcactcggatatgttgcatcttggctaaacgttgactttgctttgtggatactttcaggtcgtgcatatagttgagttcatgggctgaattggcaagcacagactttggatggaagaacctgggctgtgctgaaaagggaaatcaaagttgcgttgcgggtgactatcctccgcccgcgaccgtacaatgacaccgtcattgattgagcacagtatacattacatgtaactcaagccacctatgcaaactacccaaaccactaattcctacacgatacaaactacgcagaaaccaaaaaagatgactgatagcaaaagttaaattgaacatcatcgggcgaacccaagagtctaccagcaactagttacgaaggacaccaacagtcccatagttacccacgaaaagaaaagactcccaacctcaggggacatagaagaaaagcagtcctaaccaaagcaattccccaaaccccaatccaattaccgcaaaaacaaacaagtagaacccatcacaccgtagcgcattaagtaaggaaagccttcgaccgacacgcactccacacgcagcgagtgtgagtgactgagcagcaagtagctaacaacgaatctaaccaccgaatccgtaaagagtacggccttggcgcttaagagcatagacaacgtcaagcgaagtaacagtcttacgcttagcgtgctcggtgtaggtgacagcatcacggatgacggactccaagaaggacttgagcacgccgcgggtctcctcgtagatcatggcggagatacgcttgacaccgccacggcgggcgagacggcggatggcgggcttggtgattccctggatgttgtcgcgcaagatcttgcggtggcgcttggcgccgcctttgccgaggccttttccgcctttgccgcctgtttttggttgttagttttgtttgggaaggtactaggtttgatatgtggatataagtgtggcgggacgaagggcagggagtatagttgaagggtggttggaggttgtcttaagatgcagggaaggtgggatgcagtttgtgcctgaggcagtaatcacgtgtcgacaggggcatcaccatcaccggttctaatccgggaacatcaccacgacaaggatataacgacaacgagagataaaaaaaagaataatacttacgtccagacatagtttcagataagaagaaataaaagtacttaaaaagtagatgaatcgacgtctgtgtcgtcgataaacgatggggaaaaaaacgcgcttgatgggatggcgttcagagtaaagaggggagaaaataagaaaatcgctaagtggaggggggaaggcagtttaaataagaaagccgattacgcgtgatccggaaagtacgtgttttaggtaagcgagaaattgcattctgcaatccggcggtgattggcgggcggcggggaaagaaaaagagtgttaggaagggtcggtttccagcgcgtctaccaggcatcggcgagcccgcgttttcctgcggcgagcgacattgatactagtcacgtggtgataggagatacgggtggggctgccgaatcaggtatagcctaatcgggaagtatatcgaaagacccacctccagcttttaacgtggctagcattcttatcaagtgctacatagtacatactactatagtaagaatgcttcatgtttccgctatcctacaagctacaagaaaaaggaagttccagtcagtgcgcgtgcatcatgtctcgtatcatttcaaaacaacgtcgcggtgcctatataataggcagtcatgtatcactatcttcgcatcctcatatcccaatcccattccacatccacccagaaacctaggtagaccgtatcgtggaattaaggagtaacaagcggaagaaaaaaaaacaaaacacaaaaaaacgcccgaacaccatgcaataaaaacaaccgatcaaatacaatgcagcgaaatcaaaagcggagacaggcatactaaaaacttttgcgttgaaaaaggaagggccatccagagacgaacagcaaagaatcgaaagatgcctcggaaaagaaatcgtagcgtcatcatgcatagccaagcggcacgcagtaaacaaaaacaaaaacatcgcgagaatgtccgcaccaaacaaagctggacgggcgcgtcgaaaattcgggccgacgactgatggtagcaaaccgacagagaatgataacgaaacgtccgcggtttattatgcatcgcaaagacaaacgctcacatttgctgttggttgaaaccaaaagagcgggtagttgagatgaagtaatcaaagagtcaaaagaaagaatccatcaaagtgcgccgttacgcggtagggtcaaggtagtcgaaatttggtcaacggatttgtccagttccacacatggacaaccaaattcccttcacagagtcgtcaacgatgtttcaaggccggccggaatagccaggttggactctgtcagaacagtctattttactcaccctctaatgactgttggagagtgaggttcattcatgaagttgtggtggaaagagtggcgaaaccccataggggaggttgagggccgcggggaggtgcgcgggctcacagaagcccggggggcctcgacgacaggagaatcgcgaggagcaagagagcgaggagacagaggcggcgagatacaggctggggaagagacatgcttcgcggcctcgcctgcacgagcgttcgagatcgatggttgtgccttcggggtcgatccttgcggagatccatactgtggggggttagttgactatcataagtgatgcgcagttgagaaacttacaaagcagtacttatcaaccagttcctggtacacggaagactcaagctgtggcttgctagataccaaggaggaaggtttctgatccacacgacctccggggcggaagctatcgttcactgcagagccattgcccagctcgaagctgggggttttcttggccggtttgggagtctccggcaccacggcctccccagatttcgcacgggcagtcagagcggtccgatccaggggcgcctttgaccgaatagcagccgataacgacgctccaaagtcgtatcggttgccaaatgcctggcggttcgggttttcacgacgcttggggggtgcgaccgtatcaatatcatccgacggcatgcgagccaagggcgcaccatcggcatcatcgaaaagggatgtgaaagacttcttgtcgttgaacttcttgtcgctaaggtcggggaaatcatagttgggcggcatagactggggtcgaatgttatggatgctggtgaaggatcgactgcgcggaagagcaggttttccgcctgcaggcttatggatcttgggcactttgtggaaatcaatctgatagtttaccgaaccattgttgtcccaatattcctgtccatccacgttgtagcggatgcacatgaacatggtcttggtctccaggttggcctgatcatccaacttcaggtcgaacgaaaagcgatcgaacccgtccgctgcttgctggcggcgaacatcgtggcagtatgccgctgcaacctccgaggtagttctccagtagtccagcgtgaaccgagcggtcacactcttgtggaaagcaagattggccactgcgacatttccgatcagagtgctcttatcagccgacaagaacaatcgctcaaggcgcaccgggcgagtggcagctgatgaggtatccttgggccaattggagagcttgatctcccattcccacgaccgaccgcgcgcatccgaagagtcaaaggggaactcgtgcttgttgtcgtggttttcgactggagacgtttcggtgctgacagccaatggccggtccagctggaggaagtgacggatatgctccaagtgagagtcgaaatgcacagccttcgaatagacgggagtaccgggcatgctagatggtcgtcgtctggccgaagaggggcggagagcaggtcgaaccagctcacctgacttcttacggaccatcaggggcttgcacgacatctcctcgtcactttcgtcgggcgagctagtcaatgccgattcccgagtcaactcccgagtcaactcgatggcggtttcagtggatgatcgagagtgagtgatcttgcgagcttctttggacaatggtaggtgagggagcttggggcgagtggtcggcgcactcgacgagagccgctccggtgtttcagacgaacccattctttccggtgaactctccctccttactttgattgatcgaacagcagcctgcagctcgtcgtacctgacaccgtcgccgcgtcggcgtggtgattcttcatcacttgagtttgggccggactcaggaggggnnnnnnnnnnnnnnnnnnnnnnnnnnnnnnnnnnnnnnnnnnnnnnnnnnnnnnnnnnnnnnnnnnnnnnnnnnnnnnnnnnnnnnnnnnnnnnnnnnnnnnnnnnnnnnnnnnnnnnnnnnnnnnnnnnnnnnnnnnnnnnnnnnnnnnnnnnnnnnnnnnnnnnnnnnnnnnnnnnnnnnnnnnnnnnnnnnnnnnnnnnnnnnnnnnnnnnnnnnnnnnnnnnnnnnnnnnnnnnnnnnnnnnnnnnnnnnnnagaggggggggggggggcccgagccgggggttctggagaggaatgcactgtcggtttggtgttcgaagggttcctccgaggacgagtagcagaatgtggacgagcccgtgtcggggagcgaaccaaacctggccgctctatgggctcggtgggggagtattcaatgtgctgcgcggagagcaacttctttaccggcgcaatgtatggcatccggccgacttgcgtgtctcaacacaagaaggggatgaaaggtagataggaaggactcgggggaggggtccaaatgttcaatcacagtacagtgtctgaagtagcttcgccgtcagtaaggcttcattaaattccgggtttgtggcgacgggaggtcagtggcaaggcaaggcaagaggcgaggaaagccagcacggcattttcatcgaggtatgagatgggatgcagcagggtgacacttgaggaaggtgcccggtgccagtgggggagtccaggttgcaccggtcacacacacagcgactcagggaattgggtagtcaattgcagaaggagagagattatcaataccgtgaagtatgaacatcgagtggcgatgtgatattagccaagggcaagaggagaaggaatttaaaatagtacagagaagagacaagatgtacatataaagaagaaagaaaaggcaagctcccggcacagccgtgatcaggaggtgatttaaaaggtatcttggaagtagataaccttggaagttgtgtatagtggcaaatcaagccattcccactatgactgtgtgagaagataagccgggatggggaaagaaaagatgacgaaagcgacaaaatccggtattatagctttttccgagaaaatgggaaaatcattaaaatcctaaatgaaaaagtggggcgattaaataaaaataattgtgccatccgaccatggaagagaagtcgaaaaaagaattaatattgtcgaggtgcgtctgctttgcatagatatacccaggtcagtgcgtcccgtataggtgggggatatttattttctattttctattatattggtgtctcttgttttgtcttttttggtctttctgatatttttggtcttttgcgtgcttatatatttatttattcgaatattgatttctacctgtcagtgtccattgttagtgtcaatggcctgattataatattcatgattcaggatactagtagaatctacgttcggcttcctatcccctccacttcctatcccttcaattctccgacatgtggtctattcgcacgagcacgttggacgatcatctcgcaagctcactataatgcactgaccatcccccctagtgtcacaattagcggactacagccctcctatactcggcgctaagagggtccatacatgtccaccaactctgcttcaacctgtacgttgtaattgccttgatgcatgtgtatcaccatgactaccattccccatggtccccatgtatctttcaaaatactccatatactgcataactatactccatatactcctattatctatgtaagattccctaccccgatcttcccttatcaattcactagtgccccgtggcccagagattggtcgagatttatggatcggcccagccaaaaccggtttgttccagattctcctagcctgtggcaggtaagaagacgctgcttttctttttgggcttgccgcgcactggtaagggatacattgcgccatgcaagtgctagaagcataatatccactccgccatcccttcgactacaccgtgcatactccgtcgattgtatatatgagattggggctagaaaatacaaagggggtttcaagttccgctgggaactggagttggtgctaccggccgggaggtggctagagcgtagaggcaagtgtctagaatgtcaaatagattgatcatacactgttatcgagatttttctgacacctcccgggaagttatctgcggtggtacgaccgagggctttctttcccgcgacacgaccgtggttgccgatttcattattcgggttttatgtatggaattctacctgacgtgcatacggaggtgtaggtgtgcattggaatctcctaggtggtagtagttgtaccctgtgtgatcgggggagttcggtggagactctaccataccttgcgtgttagggctccgccgagggtgccgtaaaatgccggacccacgagaatggagatatcgagatatggatgtgcgattgttcacgtcgtatgattgccctatgatttcccgattagcgtgctcactgaagaaagcacgaatcaagcccgaatccagaagccaatgccaatgtccgaatgcagacccgaaatcacgacttgcataaataatctaattcgagtggtaattccacgcggctagtccatgatgtcaaggtgcgtttgatagtccccgatgccttggttttgcctacttggcgggagtctggaccccggtcgctcgtgcagcaactgtcttgtactccaggatatttcatacataggaagtatcatgacctctgtattatttgatctttctttccatagaaggttgagtggcatgagaagtacggagtatatgtacgaacatcatcattgacttggctgtgaatctctagggccatatctggtttatcttttgctgtgccccgtttcatcccttcagctcgccatgtctcactaatgaagtgtcatacaacggatttatattgatctccattttattcattttatatcatttctatttcccgttccatttccatgccggagtacggagtacggacatagacgccgcccggaccaacccctttgttagcggcgcagagttttcctcttttgccactccattcaatgaattcccaacaaaacaggtggcttttagatggcgtttggatgccacttgctagtgtgtatgtacttttatgatctcctcggaaatgccagattggcgagcccatggcgcagtgggtactcggctggagtcccgacttcttaactgctcgacaagtctcgaactttcagatctgcatacctgaggttgatctccaggttttcaacccctccttttggacctttggagaacgtctggagtcccgcaaaaccttggaatctatacggagtagcccacgggcgtacccgatcatttcccatatgaacgtctcggtgagcggcaaggtcgcagcattccgagcggcagggcgataacgtctgtttcaccccttgtcgagactcgagaccctgaaaacctgaaaacctccgtgcgcttttgtttttgttttcttttctttctttttcaattgttcccggattcgaacccctcggtcctccgcctcacgggaaacccgcattgtagaaagtcttccaaggttatagcgaagcggtgtatcctgtgctcagaaccttgacatcagagtttggccttggaattttactttatgacggattgcaagcgcttgctaatcgactattgaaaggatcgcccagattcgatctcacctggcacattgcaattcccaactaacttggacctcgcaaatcgacacattcaccggagtgatgtgatccttgcaattcgccatatctcgctggcgacagtcacaaactgcaagtcaccccgagggcgttcgcgtggctgaactctgacttttctgggtccagctgggtcccgtaccgagaatcatatccaacttactgctaagcataagcttcccctgctttgccttggtaaatacgaacgctttgggcagcggcctgtccaggttgaagttgagtacgaagggaattgagtagcatgcattaacgagatgacagaggggcagggcgtttctggagctctacaacatagctaccccgcgtcgatttgatacgtctcgcagctcttgcattgatgcatgcttttgaactcggagttgatgcgaccggggccccatggcgacttgtgttatggtccaggttccccaaggtttcttaccccgcgagctataccccgggattcgcgtcgggcagttatcagtctggatctgccaatgggatatgggatatggctggtacaatgtagaagtagaatctgccagatatcccaaccacagaccaagatgtgtatccctccgatttacctctacagttaaaacgttgtaatcaaccatccaattcatcatgtcacacaacatccacattccaacccgtttcaaccctcatatctcacctccatagcacaagatagagatctcaacgctgattggccgatagctcaagaataagaactcgcacgcaagcaacgcatataggctgctatgtatgcaatgtcgcacgtcacgcaaatcccagccctgcaatgcacagcaccgagcaccacctgaccttctaccttccaacatccctgttctgcagttctcaaggggcatctgtatcccggacgttgtatctcagaaaaaaaaaacgaagtggcaccaccgtacggagcacacagcttgacatccaaccactagtaagacagacaggcgatcaggaacagccgctttagtcgattccgtatacatcggataactaactaggtgggtatacaacgtacatgatgtgtactaactcagttgagtgcagcacggacgttagtcgtgcagatgagatgagatgatagtaacactagaaaagtatacttccaatatactctctctaactaccaactagtctctttcgaatttagcacacacggttggatatcttggctagaccccacgcttatgcatagcatgcgatgggcgattcaaaaaaagggccaaagcaacaccccaagattcgacgaccggccagaacggaggcgctgctgtcagtgcgcgcgcgatcccggagctaactacggagtacgactcgataggccgtggtaatagtggggggagggcgtgaatcgctttagttagtctgcgcgggcgtgcataagacgctgcattagtgcggcgaactaacagcgtctctatgcatgaccgacggggtcagtgcatgttcgctgtttttctgggctgggggagcaggggcgtgggtttatctcagggggtttcaggactttgtttacactttgcgcttgttggatgaggtttttggtggcttgttctggggaaaatgatgtgcaacttgcaggtgtaccccgacgtcgcggggtttttctctctccacatttgctattttcggatatgggtggttggcaattcgtctgacatgtcgggatttgggaggctagtctgatgtcgatgtctgttgagaatgtgctgttgatattgcgattccgtgctctcggctaagttgtcatttgtgaggagtccactatttccagacctaaaaatggatggcaatctcggaacccggatggccagatatgggtagattacataacagtcaagccactcggctatctccaaccgtcataatacgccggggcgacggggattggctgcgtagggcccgttatcattccacgcgggagaggcgttctccgtcgtcagcgttatagaacgcccattttgaatggaataagttctggatttggggattggaccgatatccatctgttcagacgcattccttgcagcttggaatgtttcctctgtagatgcacagagataaggacgcggggtagttggattcagctcgttccctcgggtgggtcaaagggtctgaaggaataatgatcgctgctaggttgatctacattcttccttgtttgctatcgacgattatgcattcaaacgtcattttgtaggccaatcgtttttatccctagcgagacgacatctaagagggaaacagggatattctaccatgtctatcgacccgcctacgtaactggcctttttatataaccagaatcatgtacaacataactaggagtatttaaatatagaatagaagcaccggccaactacgtattcttgtactaaatcgaaccctgggtactttagtttattgctccgaacacactaacaatccatgaatgttctcggattcaacggattcctatcttcggacattgttgtatgcctgcgcccctcaattgcggggtgcatctgccacctcatactgtccgagcgaattctcactttacagctgatagtccgaggtgctgtataccttcccagtaggtaaacagctgacaatgcggagatagggataggatcacgagacaaggtaaacctaccttggaaccctcaactgataacgctagttgacgaatagatcctctgatcttcctgccatccaaggtctcgaagctatactccattcaagccacagcgggcgccagtgacccggccctacaagcggagatccctggacacagaccttccccacacttcgacctctcacgctcacgcaaatgatcacgacatgcatctctcaccgggagatctgaggaaagacagcgtcggcgttaggtttccacgcgaagtcgtatatcaaactccaagacagagaaacacaaattcaaaccccgtgcactcacatgacacatgacacctataatggcaggtgtctagttccgacgttccggcctcgcaacagtgtgctcagactccaagcaaatggcatttcaaagtcaattcttcgcttcctcgcagccaccccctcaccgctacccatgataaccagtcaagccatgggaataatggaaactgctcatgtccgccacaagagaggcgaggtctaaacgacgtctctcgttatccgcctctttttttcccccttttgttgggactcacccccgctcccactttccgtggcgggccaaggactatactacagctcgactgaaactctttcttctcggccggcctggtatgctcaggtactggtgctcggacttgtattgcgttgtcactggaggtacctctatctctgtccatagaccgtgcgtgttgtgcttccatggcgttgagggacgtgtcctgcatctttgccgccactgtgtcggcgaatggggcctttggtcggggagatggtgaagaatagcacagatccctatagtctggtttagaataggtttgtggacttttaagtcaccggtatcgggtgatttgaatttgactctgttgaccgcttgatcttctgtatgcggggaaatggcatatagatttctggctacctgggctgcctggacacaatgcctttgtttagcatatacgcgatagcctttcatgtggaatctcgcggccgagtgatcatctttggaatttgatcaagactgacaccgaggagccacagtttagctgatggtcaattagactcattcctatgcagttgctgatattcttccgctctagcagttctacctaggctacatattattccaattcgaatctcaggagtcaaagggaatcttcaaagaaattgcacggtgcatgcttagatatatgtattctcctgaaacctcagtttgctattttccgcctaaggcccgcaacctccaaagatctcatgatggaatcaccatcttcgatcttccatctaccacattgctatgttttctcaagtttcatcgggtgtgcaaaaactacccgtcgagaaccactctgtaaaagtggcacaagacaaaattctctccaggcagtccagattcaaagtccgaaagagagtcgaagttgaagttgaagttgaagtgttgttggaagtgaaaaggtgaagctgtaagcgggagatcacccattggtggagccaactccatcccacattcacgaaccttggtcctcacctctgtttacttcttgacgggacttttccaaaacccgatgtctcaagttcaaagttccgcgttggcagatcttgagaaagagctggtatgctcggtatgtacttggccatgccaccccttgcatctctaacactctgccccagatttgtaccgagctcctctaccagcccctcactctcctcgactgcctccacaccttctgcggatcctgcgtgaaagaatggttctccgcacaagggtcgcgtcgctcccatgcctcgcctcgatttacctgcccgtcctgtcgcaccgaagtgcgcgacacccgcccaaatgccaccgtcacgaccctgctggacatggtcctgaccgcgcaccccgagcgtgctagagctgcagatgaaaaggcggaaattgctacgaggtacacacaaggcgagtcggtgttcccggcacttccttcgggcggggagagcgcggaggatggcgaggacgatagacgcctgctggaggatgtacgcgagctgagtctacgcgaaagccgggcacaagctaggcgcgaggcccggcgaacgggccagtcttcgcggacgcgcgaaaggagcacccataccgagaggcctgcggaggacgcccggtcaaggcggaggagggatgaggatccaacgcggcagccacgtacgttgcggcccgatgattcggaccgtgcccgacgggttgagcatcaatctagtctgcgatcattattgagtttgtcatctgatgcggagactatggaggaagagattttgcggcaaattctcgaggacggattactggacaatatcaatcttgagaatcttgggccgaggcaggaagaggaactcagtgaacgcatcgcggatgcttaccgtcggaggcatatgcaaaggtcacagtctcgccagcgacaggaacagggaagagaacagcggcaagagcctgacggagctgtgcgaacacattctcggtcccagtccgcccagctgacggaaacaatggcgactcgagaacataatggtagacgcccgccactttccagaccgcatctgttggattcggctcccgcgcggccgagcaccgcgggccatccaagtgcgcgccgaaggacctcgcccgtccgaatgaacccggcgtctgcatcggatgaagctataaggcctgctgctagatcctcgagtgatgtcactacggaccgccacctctctcaggctggacgcttacgatcgggatcatcatccaccaggccgcgacgtgccacagagtcagaacagaacatttctagagcgtgggtggccggaggacgagaacgaagctcttccagaccgaccacgagccaatcagccacgagctttcccacttttagcgctgcgccctctaattcattccgccatacgagtcacaccgatcatacccttccagcattatcttcgccccttgttccagtccggtcagacagacgaacgagaccatcttcgtcccgatcgaatgttcctgcatcccccactgtacaataccccgagccatccatctcctgtgaccgttgcggaaagaacaacatccaatataacctacacaagacatgcacaagttgtaaggaagggaacttcaacctgtgtctacaatgttaccgcgcgggacgtggctgtcttcgatggagtggatttgatgcctccgcacacacgacctttcaacgaatcatatcgtcgtctactcgacgccctttacaaataaatgactccggccatgacttattgtggttcaaatacctgcggccctccgagactgcccatcaaaccgtgagcggggaaaccaaaatgaccaacgacaacccagcccgccggctacaaagcggtctcttctgtgatacgtgtcaatcgtcgacaaacgattgtttttggaaatgcagccactgcaacgagggagactggggtttctgtaactcctgcgtcaaccaaggacgatgctgcacccacgccttattgcccatccggcgcattaccaatagcccatctccaccagcaccgtcccccacatcaccggctggatcaaataccctcacgtcatccgagatcgagagcttcaaaatcctctcattctcaaccaactgcgatatctgcacatacccaatcccagcctcaaacacccgctaccattgcctggaatgcaatagcggcgactacgacgtctgtacaaactgttacctcaaactcgtggcaacaggcaaaatcaacaaagagaacggacacaacggctggcgccgctgcctcgccggccaccgtatgatagtagtcggcttcgaagaccacgaagaaggccagcgccgcgtcgttgtacgcgatctcgtgggtggccgcgctctgaaagacgagcacgtagcacaatcaaaatcacactcaccaacttccccagcatccggttctccagtcgcatccccagagctaggaaccggtgactggagctggaaagaaggccccgagcgccgtaagaaagcatcccgtctgcgccccggacatgcccccacaaacagtatcaccgggaattattccgatccctcaaatccagcacattccagtgccgcaagtccggttcagggcatcccgcccttccgccggttcccgcctgacggtggtgtcgggctcatcgtccatgccctgtggtcctggtacccggaagaagaagtcgaagacgagcttgtttttccgcgcggcgcgcatattaccgaggcggagaatatcaatgatgattggttctggggatgctatgctggtcggacgggactgtttcctggttcgcatgttgaggttattggtgagattcataggtgaagtgtcttggcttttttcttttgcttttgaacatcacggcagatatgataagcatgacatgcatcgtatcatatctgtttttttttgcgtttcttcgttgcatggttacgatatttatgatgatcggagttatgaatttggatgctgcatgagcgtttccgagcattgcatacatagcatattgttacttgttagattcaacgagccatgggcttttctatgtctataccgtgatattatcgagcgaatatagattctgtgatgtatacctacataccaccacgccaatgagaccgccaaccagtattcccatacagacacgttatttcactactcatattccattcattcctgtagtcttcgttattcctgagaatgtgttggttattcctgtcaagataccagatgcctgtttgttgcggcatcctagctgagttcagtcgtttgtggcctataaatgtgtacataaaaatgaatttatcaatctcttctcctttctaaagcatactaacgatgactacctatccatactacctgctttactttctggcaatacgttagtgaaaccattcgttcctcaccttacattcattcgttggtttaattatctcctagctaattgccttcttctaattctcgaacagtggtccgcggtctcggttacagctgctgctggcgagtttgaccctgtactcagtgctccagggtaattgttgtggcagacacatccagcacctcctcaatctcctctccgccgtcgacggtctaaactacctaaaccagtagatcctatcacagaaggccatctaccagtaaggctgttcttttggaacgcagcattgctcctgtattcctacgactgggtatatagttcgaggatcccgtggggccaaacagcaagtattagtatactatcccgtccaccattcgctcaattaggccgaaggctttagccgggtcaagttgatgctccaccatcccttccgtgcaatcgaggaactactcgagtgagacggtacccgatttccctcattcaccgctacataccagcattgcagccttgtacacactcatccccatgacgtctacgggaaggatctaggcgaggagacagaggagctatttgaggaagaggatacggtccccgccgataaggagaaatacaggccaatagtactagaaagcatcgtaacaatttcacgaaaatagggtcttcctagtatatttgtatagatagagagctctctgtcaccttctacacatataaaccaggaacagccatcgggcaggactcaagcgccggataataagcggtagctaaaggtcatagagacattatcctaccaatccaaaagccgaatggaataagacacgagctacgagttcactgcgaatataagccaggaaacagattcaacctgcttagcctgatcaagatacgccaggaccaaggagtcaaatgaaaccctgacgacatggtgataaaaccttagcggcacaacggccgggacgtgatggtgcgcaagttaaagacccggacgcacttggccagcgtgcgccaccaattcgttcttcaaccggggggtattgtttctctttaatgggttatccaaacttctgtaattgtaactctgattcaacctgtctgttcatgactcctattaataatctcttgtggccatgaaagccaatctcgatatttcggatccaatacagagtataattgggtcataaggcgcgagcttagaccttccatccaccacatccactcgatctgacgaatagatgcgcaccaatgagcaaagataatgagtgcaatcggtgcttcctggcgcagaagatttaaatattcatccgagacatcgagcagccatcggaagatatccgcggtctcgagcctccgcatgatgccaggtcttatagctaggcccaatgttcgggcaagttcatctaaagcctcttggtagatcgaccggagtgatgggtcagccgcgcactccctccatatcatttgctgcaactcccacacatgcggcttgccttgctcaagggcctgtggcgagcgatgggcagcagctaaataagctccattcgtgaagatcggtgccagcctcccggtacgaagatcctcgccgccggtatggataacagtcgttgtccctcggaaaagacgggcccactctgatagattgccgcgctcaaacaggaccaggaaatcgccttcttccgatggcttggcgcaggagaacatgcacgttaaagaggagaaaatgaaaagtgccgagccgttttctcgtgcgagcggtgagacgagcgggatcatctctctcacggcggtgctgtggtgcatctgtgcgtgagcgaggcaggctgcacgtcgagattcgtcggagcgagctagatggagcgcagaaaatgctagcaaggtgtgcaatactggcggcgttgcaaagccgattcgaggtgcttcattgcaccagacagtctgcacagtgggactgcgcgatagtgtgtaacaggttgacgttgtccagtgatgcaacagttccaggtcaaaaacagccaatgtggaagggaatggtcctaatgaggacaggcttggcaagacttgggagacttgtgctagggcacgactttttccagatgtagtgctttctgggccagatagtgacacgggtgactctgctgagttcgccggtgtggaaagcacagttgaggcactggtaaaggaacaaaccaccccgtgcttctcacaatttcggcaatgtggctggttttcgtcacactgatacagaattataagctagagcgcaataggaacattgatgaatctctcaccttgacttttcgctttttgcattgtaggcacccagatcgcgatttccggtgcgaacgccggcctgggggtaatgtggtcatttcaatcactagcaggtactatgaatatatagaccccgcgaggcatctaacatgtattgcaccattgagatggaatataggaggccaatattccgtggttttacgggggcgtctcaaatgctgggggctgcgctagccgaatccggttagcgctataattttggtgggggcgaagcatccatgggtgtattcttagtatggacctcacgatcgtgataattagaaagaagcataattagttatgctgtgtatgagctggaataattcaaaacagtttgaaggacccatatttagagagagagagatttccctgctcaaatgaaagaatattcaagtcacaatcttgaaggtcaccgaaagaaacaaagcagcctacgagaacaataagataacacgccctcaacacagttatacgatttccaaaatgatacttagtaaaagactatcagtattgactatctagatttaagtatatctgtgtgtagatatatatttcgtcgaatgataaaccatttcccaacatgaacttcaaattatttcgagtcaatcaaatcttgaacatctagatcgcagtaatgttgataaccatgcggttttacataatgttgtccgcaaccgtctttgatctagagcctgcggccggacaaaacggtcgaagtcccgttccattacgtagccccgcatctctggtatgctgcacctccttgcatatgtaacgtgtctcgataagacaatccgccctcataacataggtcgagcacggctctccacttggcctgcatgcatgacatcggacgcactgcacagtatcctgtcttgaaccctgataactgaccgctcttcttgctcggtctctttaaatgaccgaatgagcacatacattcgtagcatcaaacccaatatcagcgaatatctggcaagatctcccacagtaagtacttggcactctgagtcgcgctagcgcatactgatcaactcatagatgcctcaaggaactggaagcctgacaagcgacaaaggacgagtccttggtcaatttgaagttgaaggcgctcagtatattttcgtgggcaatttgactggcttcgggcagtctttctcccttcccaatgccgacgtcacctatgagtcagccgaccagttacacaaagaatccgaagaattcgaaaggttgcccgtagaaaaagaccagattgaactcaggctcaagaatggggttgcaatcacaggcggttttgatatgccatttagcgatggcgagatgaagaaagcgatcattgtcggcggtggagggaaatgggtgaagttgtgatttgctgagtcatgacttttgaatgtttgagagaacttgcaatgttggattgaatgaatcagaggataataaatcaaggggttggaagtgaaacgatgtccacttagcatcagtatagtggaccgaggctatcaaacttggcagtaaggcaacaacaatctctttaattagaacccacaaggtcgaaccctgaatacgaaacgtcctccactcgtgaagattggcagacgtcaacaattctagaaagccggcagggctgtgaacgcccccaccttactgcgccacactcgagccgagctgccggcatataaacagcccctcaaccctcagcccggaccatttatgacctgcatacaacgagccgcagtctaccatgtcttaccaacctaaccgtgagtggcatttcaaatacatttctagtcttgacaggagctaactcagtcaatagaagctccgtatggaggatacgcgccccaatacggacagcaaggcccgcctcaggggggctatcagcagccctatggtgcccctcccccgcagggccactatcccccgcctcagcagggacattatcctcccccccagcaaggccactacggtgcgcctcctccgcagggagctccttacggcgcgccacctcctcaaccccacggataccatgcgccgccggcgcaacccccatacggccagcagccacatggctatgcccctccgggccaaccacccgttggttacggcgcaccaccatccggcggcggttttccaccccagggtattccgtcacagccgtctcccggctacatccctggtcaactagcaccaggcgagttccggccccaagcagatgcgcttcgcaaagcaatgaagggcttcggcacagatgagaaggctttgattgcagtcctcgcgccgctcgatccgcttcagatggccgctgtccgcgacacatactccaagcaccttggccgcgatctgttcaaggatgtcaagtctgagaccagcgggtacttcggcgatggcctacttgccgtgctggatggaccgcttatgaatgatgtcgacaacttgcactcggcaatcgatggtgctggcacgaaggagtggttactcaatgagatcctgctcggtcggtccaatgctgatatgaatgctatccggaccgcctatgaaatgcgacacaggcgttcgctttctaaagatgtcgaaggcgatctctctttcaagacgtccactctgttcgccattgtccttcgtgctgctcgccatgaagagtctacccctatcaacccgcaaaccatcgagactgatgttcgctccgtgcaagggaagaacgtcacagaggtttgcgcaatctttgcccaggcctccaatgccgaactccgcgctattagccagactttcgagtcacgctaccatatctctctcgagaagcatattgagaaggcattctcgggtcatatggaagatgccctgctcctgatgctccgcacggccacggatcctgccatgcgcgatgctatcctactcgagcaatccatgagcggcatgggcaccaaggacgagcgccttattatccgtgtagtccgggtccactggaatcgcaatcacaaggagatggttaagcgcgcttaccaacacaagttcgggaagagcttgattgaccgcgtccgcggagagacttctggtgattaccagcgattgatggttgcccttcttgagtagaaggcttttttctttctttttcctttttttattcctgtacatttatgaccttttcctttgttcatgatggttacatttattctgagataccatgatctgacatgaggaatgtgttacgcgagacagatagtgatgtgctacatacagtacgagacgttaaatatattatattctcctttgaccatcttcggaaccattgtatttgcataaatcagattaacggtgtagagacccggatatttacaagttaatagtccacttcgtccgcagcctctctccccaagtttggaacaaaatcggtataggcgccattgccaaagcaagggaatgccagcaaactatttccccacccaaggccaagtttctcgtacatttgcaatccacacagaggaaggagagccccaagcaagcttcgcagaacagtgcaggcagccacagcacttgcagcatgtgcaaggaaagcatctaccagatatgtctgaacacacatcaatataacgatcatcccgaaaccagtaacagcatttccaatctcgggaacgatccaatggaccactttatctgtcgaccatccatagataaagagacccgccgggatggccaatgacccaggtatggtaaggtacaagggaagtcggtcctcggggataggtgtctccttgcgcgcgagtttgagtttgattttgcgatcactcaacgtccccacgtaggcaagaccaattaacattcccaccccgcttcccaggaatgagaggccgctggcgctggcagagaacccatactgaccctcaaagacaagtgtgaatgttgtgaagaggatgtagaggaagccgtaaagaacggcaatgtagctggacattaatgccactatcggggacagaatgagcattttagatggacgaatgagactccgcaggaagagctgttttggagggactccggtgtccaaacaagatttatatgccgtatctcctgttgactttcgcagtcgagcagctttccgctcaaggaggattggggcatatgtctcaggcacggcgaaaaagaagacgatcgatgcgactccgccctgaaaatagttagaaatgagacagacccttttaacctggtattatctttcttaccgtgatggaaagaacccaaaacacccatcgccaatttgtagcctccacgaggaacccacccacgacggggccaatgattggaccgaacaggggtcccatggaccaaatagccatcgcctggcctcgtttctctctcggcacaagatctgcaatggtaccactaccacatgtgatggcagcgacacccgcaaacccgtcgagaaatcggaaaaccaccaaggacgccatattgggagcaaccgcactggcgatattgaataccacgaacaggacattgcaaacattgtagacccatgcgcggccactatactcgctgaccggtgcgacaaccagagggccgaaagcgaatcctagcacgtaaaccgagaccacgaaagacgagaggagattagatgttgtaccaaagtcttcgaggacttgtgtgatacccggcgcgaacatcgaagaggcgaggggactagtgttgttaggaccttggtctatactagatatataagtaagtactcacgtcaagaaagtgatgaaagaaaccatcccaataatagtccatttgcgtccagaactccagttcatcggattctcagggtcctcgctggctggctcttcccagaagacatcgtattcggacatatccgccgtgtattcgttggacttctcagctgtcagtacggtagattgcgcttcaagatcagacgattttgtgtccatgtcgagggcaccgtgaagacaaatccacacacatgggctcttgggtgcggcgacgggcctttgaatgatttcaagtctgtcatatgcaagagatgcataattgccaccggactttccatatccgttcgcctatcaaagggtgcgtatactaaattaaatccccacgttttagaccgagggacttcggattcgtatatctcgtggggtccattggctaacgtcggacgatctaaacccggcttcggcttcgggttcggattcgtacgagggtttgacgtggtggctgatgggattcgggttctcattggcgctaggatgaactaattaagcttggccgttatgcttcaagatggcattgttacagaaatatcattatctgcgatcgacgcgtccccgatcaacatggcctacctcggtgggtcaagacctgcacatataaaagtcaagacccccatttcgcatcggactctgagataacctataagtgaacatcgagacagaatgggaatttttttcaacgtgcagcaggtgctgttaacggggctatttacggtatgtcatgcgatgccttttgacttcttttctaatgcgtccaggctatactatatcttgcctctaaagtgatctacaatgtgtattttcaccctttgagccggtttccggggccgttggagcacaaaatatcacgactgccatacgtctaccggtctatccggggaacccttccctttgacatgctggaaatgcatcagcaatacggtaacattgtccgtattgctccggatgagctggccttctcccaccccgatgcctggcaagatattatgggccatcataaagggaaaactgaattttcaaaggcagattggttctaccatgcggtcgaggaccaaccgtcacatgtagtcaacgaaaccagagagcaacatggacgtctccgccgacaaatggctcacggtttctctgaaaaggcaatgcgagagcaggaaccaatgattcgtggttatgctgatatgttgcttgaccgattacatgagttttgcgagtctggtagtccggtgattctttctgattggtataactatactactttcgatatcattggagatctggcatttggtgagccatttggctgtcttcagggatcaaaccttgacggatggatcaaggggattttcgacgccggccggcttggaattatcctgcaagctctctctttctatccacttgtgaagcggacgctactatcgatggtgcctgcttcaatgcaagaggcccacgagaaacataagcaactcaccgaacagaagatgatgcgtcggattgaaaaggaagagggtcgacccgacttgattgagggacttctaagaaagagagaggaattggtgagtatttaactaatttccgttcagaatgcaactgaccattgtcagaacctgagcattgaggaactcgttgcaaatgctgaaatcctcattatcggtggttccgagaccacggcttcattattgagcggggtcacttacctcctcctcacgaatcgcactgcctatcagaagttgaaagaggaagtgcgtactgtgttccaaagccaggaagagatcaacctgatctctgttaacatgttgccctacatgcttgcatgtctcgacgaggcaatgcgcatgtatccgcccattgcaaacggtcttccccgtgtatgtcctgaggccggtgcggaagttttgggcgaatatattccagcaaacgtgagtctcattggcgtgaatactacatattgatgtctgctgacggcgttttgaagacttttgtttccattcatcaatgggcactttaccggcgcgaagagtatttcaaagaccccaacacataccacccagagaggttcctgggtgatccatcatttgcagacgatcgtcgagaggtattgcaaccattccatactggaccgagaaattgccttggaaggaagtaagtattgacctagttgaccgcaagtaacaggcgatactaacggtgtcactagtcttgcatatagcgagatgcgtctaatccttgccttgattatcttcaactttgatatggagattgccgatgaagccattgattggattaaacagaggaacttcctgatgtgggaaaagggtccgctgaaggttcatttgactcgggtatagacttatttattagacgcaggaagatagattgaatgatgaatccctatttggcaagtgatactcagtcaggtgatcttctggataccccctccctctacttctgctctctctctcacactatccagcattcttcaactatactcctaaccctcccacgcatagcataaaattaggcttacttctaggagtattaggaaaagcacggatctaacttacatataaacactgtccctgtcaaatttgttgcttggtgatcagtcattcggttcctctggaattttgtcatcttcttacgcgcttcctatgcatctttctatcgccccgaatttcaccatcaacaacactgcacagatcgggatacatcctcttgctagttctgctatacattttcctagcgatcttcttataggtcgtcacttacgtaccactcccgagtcccaacttcctaagccgattagagaagtacactcggccacctgctcaattccccctatacagaaactatacgcgaatacttcaacgaggcctaccgaatcgagcagggtctgcccgtaaggggactcacctggtctcagggtcgaagtgttctagggcgatgaaacgatgaaaataattaaggtaattgattatccatattaagtcctgcttgtacaatggaaatcccacacacctcacctcttcctcttcctctatggcacatatcagtcatagcatcatgcacgccatatcgaaccaaaaaaaacaagtacatagaagcaaaacaaatgaggccctgagcgtaagccacaaagcccatgtcttcaaaacgctcaaaaaaaatcaaatttcgtcaaggcatatatatgggtatttttcagcgtagagtatcagtcaatcatggatctcataaaaaaaaagaaaaaaaacaagcagaagaggaaatgaaaatgaaaatgaagaagagaatcaagaaaaagaagaagaagaagaaaaagtaaaaacatatgtagttccactacacacttgctgtgcgtcgcggaaccagactgggcttctgagcgtacgcaatgaacatacggaacccggtgccacgcttctggcactcgcgaagcaccttccggtcattccaaatactcggaccggtatttccaatcgaggcaataggatcctcgtagcatttcgaataccaccagcgtccgacgcgggcaacgatcttagcgattgactcgtcatttgccggcgagggggaaggatcggagagcaaatcgccgagagagatattcgcgtcatttgaggggggtctcgaggcagttttcgtactttggccatcacccgcagttgtgacagatatggtgggtagcgagaatgcagtggaagagggagccattgaaatggagtgtgctgaggagctggagtcggaggatcggagcaccattcctgcgactggaattcggaccatgcagcgacggagactgtcgaagccctgcgcgccgagctcgcgttgtacgctgtcgctggttggtttcaggctgagagatgagtctgagaggcaggtcatttctttgagttggcggatcgctttgcgcgtgtgaggtcccatgttgaccatgtcgcggtctaggaggctcatttctagatatcctcctgtgcggagaacacgtttgcattcttggatgatgttgccttggactgtctcggagcagacagcgggaaatcgtagtaccgcgactgtgaaatagtcctttgggaaggggagagggttgtccagtccggcgtgatacacaatgtggtggttggtaggaggctcccatgcagcggggtggggaggcgccgcggatacaggacgtccacccaggctatatacctcggcatcagggtacgtcaaggaacagtagaaggaccagtcatcatttcccagtccatcaatcacaagaattcgcccttgtcctccggccttgacgtgattatgcgccgggctgaaaagaactcgaccgaatgacagccagcgactagtcatgagcgaagcagaacgcatgttagtccgtgtcactgcatcccactcacgctcggaagatgcggcttcttgttctcggtggaactttggtctgggggaagggacggcagcgagggagttaagaaatgtagactgctgttgacgacgctgatctgtcgaagaaggcttctcggtaagagcggcagcctgttgcgtcttcgcctcatttgagcctctatgtccggcaacgagatcactgtaagacggttgagacgaaggagcggtcgaagattgcaaagcagagacaatctgagaacgacgaagatgaacagagctgccactcgagcggactgaattaccactaggtactgattggggattattggcattactcaattcatcctgaagagccctgcttgccatcgttgcaagctcaaacctgtcctcttcttcggtcttttccgactcctcgggcttcggttgatctggcgacagaacgtggtcaataagatcatcatactcgttccacacctcgtcatcggtcggcggagaacctggaatcgggggcacggctgtaactgcagccagagctccagagctatctgacgaggttgagcctttcttcggcggaaattgaagaaactcataggttgtgaatggcccagcaaggaattccaaagcgctagtctcctcggaagcgctaaaagtcgggttgaacccatggccccagtctgaagattcgcttggaccaatccccaaattcaatggaacattggcgacaagtggagattggtatgagctttctgtcgttggaaccgtgagggaagccgattcggcaacactgaacggacgcgagaatgactgcatggcgggttggtgatttctatcgcgccgcgaaactacctgtggaatccgaccgacagaagccaagcgcggacgttgttcaggtagtatttcaggctccggggccataaggttgcgattgaacatggcagtcctcggtgatgggcgatcatcattttgaaactcaccgtgcatctttggcggagatggcaataaaattgacggctttctttttctgatgctcaagcctcttgggatttccacgggctggaaaaccttttcctcctctgttggtggtgagtcttcgatgttgttgatgatttcctcgagctcgtctgaatcagcatccaccaaggcgtaatgggccacgggccgacggttgagaacaggggagattgccgcatgaagtctcgcagtttgggatgaggtcgctggaggaattgagtccttctgttcgttggcacggttcttctggaagaagttccacacggatgtctttccttttttggagtgttgcttctcaacctgctcgggcttagggatttgttcagcgggcgtttgcgtacgcttcggttgctgtgaggtggcactgcttggctcatggctagggagcgacgtgtttgtgatagcagcctgggggttctcaaacatgccatgtctctttcctcttggaacgggcatgcgtgaccttgatgcgtttgaacgatcactcgcgttagattgggattcggagcccctacttcccattgatctggcgccattagaataacttggcgtaatggtctcaccaaatgcccccgaagtcgcgagggattcggtagactggctagtcgagtatgatagcagagtttgccgcggcaagttcgaagtggacgcaacgcttatgctgctgaagctctgctcgctttgtgttcgtgacaacgatgagccgtctagtccaccaccgttgataatgacgggctccaggcggctcattagaaagtcgtcgatttccaactccgggcgactcgactgactccctttgctggcggcactccgtgtcgtgcttgttgatctggttcttgtcccgctgctgctactaccgcttgctttgcggccgcgctgtccatactttccgtagccctcatgacctgttcccgcagctggacctttgcgagtagtagctcgaccttgctccgccaaattctctgacatatccggcttggacttctttgtgaacagaccgaaccgtttttgagttggaatttgctttgaatccggcttctctttgggcatctccttggtcagtgtccggggtgtctttttcgatagtacgggagatccgccttcccgagaagggacttgagagatgcttcttgattgcagcgagtctatcgatgcaacggcagactggttgggagctgggtgtggctgttgggtcgccataatcttttcgatcgactcgcgtcttgtgtggcccgttgttctaagataccgtaggttgctttgaacaatcggcgatgtttcaagttctaagcgatgcgttccatctctgctcggtcgtggtggagtttgtggtgtctccgcattccgtgagggggaatattccataatctcttgtgggtcaaacaaacgcctctcggcttcctccacttccttccgagcctgttcaacgtcgatatccggagcttttggagggctgaaattgacggatgactttcttggtggcggactgcggggcgggcctcggggaactgtagagggagatttggacgatggtactctctggccattgccggtgccgattgagcttgcgccagaaggctttgtaggaagtacccgtttttgagtcttgagctccggcctttcttgctgggcggttgcacgtgccggtgaaggagagaagacaggcaatcttgtttgcgacgtgctcggttgtctcagacgaccaatctttgtaataccgggggaatatgatgataatgatgttggggtagacccccgactccaaatactgggagattccgagtatcttgtcgaggggctacttgacagtaagaagggagtaggaggcgcgggcaagttttgcgtatcgagggtcgttcgaaggcttgccaactcttccggaccattgaacctagaccccaccgagttaatcgccagattactctcattcttgtggttcggtttgtaagaggaagtcgattgccctaaaagtgaggttgacgaatttccgtgtcctgacacattgttcataacgagagaatgaggctcttgcggaatgacaaggctaagcttctccgagtgcaattgctccacatgtttccctattgtcggtgccctccttcgtagaacattccgtgctcgttttggcgggggcaattgttggccagcaacgaagagcgatgttctgttaatctccgggctcgaaagcgtcgagtgaatcggctgggtgggattcggagaagaggaagcagacactggcgtatttggagatgttgtgctaccaatgctggggcgtggaagcatggacaggcgatttccacgactagtagatcgcttgatagccgacggcgctggtactgggccaataccttcagcatccgagaatgacgagcttctgctcctaggggtgtgattggctggtctcgcaatttgagatctcggaggtcggccataggcaccagcattgggacgcgataagtttgaagaagaaggattgtgtggcatgtgatgggcagaactgtacgacatggcgtacagatgagtgaagttcccggctccaatccaaggacaaatgattaaacggtgagtacatgtacttcgttatagtaaccatcacgccgttataggggtatattgctgtctgatttaatcagctctcttcaatttcgtcaaattcaacgtataagctcacggcatctgagtcacgtcaaacgaaaatatcaatattgatgggcgcctggcgctcgacagtgggggtatagaattaaataaaaaatagaagaaattcgtaaaaaaaaggaaaagggtatctcaaagtcgcacaactaaaaatcaagtgtcaatagatattacaaggatgtcaagaatcataaaaagaaaaccacatggactcacagacgtcagtagataaacgagaaaagtccactgtggatcgaagccttaaagctgcagctgcttcgccacagtctgcagcaatgtggcgttcgatttcagggttgttcaccagcgctggccacgtcagagataaaatccgactgaagcatgtaaaaataaatgtcaaaagattcaagacaggaatttccgagatgccggagatttatgtgactggggttgccgctccaatgtgggggaaaaagccttgaaaccggaatgcccatgtatgtagtaagagcgtagggatctcattggtacgaaagtaatgtgactactgtgataagacgggaagaagtcaagactgcgaagacctggagcctgtcagaaggactagcacgttgcgaaaggtggtgcttctgaagcgacgacggtccccatcgcaaagtcaaaaggaagttctacaaataaccggggcgatcccccagtggccggatcaagaagattgcgcgcacggaagcccacatgaggtaaagaccggtccactcgagggttctcccctagcagggacttgtcgttggctgctttgcttagacggtatgggctcgcggcggcaaacagggtaccgggctagacacaacgtgacagggcagtggtacaatccgtggcgtatgggcttttcgtcatgcatggcttgagcgttaagaaaaaaaccctacaaaccgtgactcgttcgcgatgtcagatcagctgatagactcaagctgagtatctgcacagtcggaactgcacatggatctagcggacaaccccgtattgaccaggctttatcgcgtctccctcgcctcctccacagcacattcggagacgccgaacaagtcaatcctaaataatgaaatgatcgacgcggtgattttgattttcgttctttttaattttggcggtttgcaactccagcctttcccgctattcggagaatttcccaacgtggtttcaagggaccatgcatatgcggatagacgtaagggtggccctaaaatgcttcatattttccgaaacagtcttatatattcccgatccgatatgtctgatatcgtatattactctgagacatacctttccaacggccgtagatatcaatagtttggtacagaggcccgtcccgaacctttcggggaccattccaaggttcaaggatgaaagcaagcgaagagacttaaagttgggtctagcgtctaaacttgtacaactcgaagagccagtgactgtccgtagagagacaatttcgtctatagaccgggttcgatactcgagccgtggagcctcgagactgtggagcccgctagtcactgggctgtgatggcccactgtatcatggagcaatgaacaagccctggacgaaaatcaaatgttagctccaagccactgtctaaaaaaaggccagctgtcggttgtcattcgcggggaggacactgatccaagtggggagggcgttaacttgggcaataagaacagcgaatgatcacgaacgagaaatgagtctgaaatggcgttgaccagtgtgtgttgtatattgcaaatgtgatattgtatgatgtaccgaatactccatacctgatgcatttgatgtcccacaatcacggtctggtccatcctcgtctaatgactggccatagccatgctgcaggaacaagcgactaatgcacccttcagctgacttcgcacagtcaccgggaatttgtacgaagtacggagtagtctccggggaattattcctgcggcaagaaaagttagattgagttttctccgaggtcagtgcttggatgtgggaatggagaggttgagaattcagaagttgagaattctccatacacgtgaatcgccttcatacggacatggctactttcgctctacaaaccagaaaacccacacttgcacattttcattttgagatccacatatattaaaacaaatagaatggaatgattgaccctgaaattgcccggtagcttatcaacacacaaacgccgatgatgaaagaacagatgggaccgaagcccaagtcaaagaccagacaaagcaaatattggaaacattcaagcagcagctgcaaatcgcttcttgcgagcctccatggccgcattatccttctcactccatgacttctgcgcagtgttcgcaccggcattaggcttctttacgccggcattggtcctgttaccaccatcagcgcggtcaccgcggtcaccgcggtcgccacggtcgcggttgcggtttccatccccacgttgacgatttcggttgcgtccagtatcacgtctctttcccccacggccaccctgctcgttgcggttgtcgctgcggttttcgttacgtctcttgcgggagcgctcatcaggaagtgcctggtcgagacggcttaaacccgcagctggagtagtatcagcttcggcacccgtaccgaaccgcttagcgcgttccagctgctttgtagcctccttcaatgctgtgtcgtcatcctcaacaatgccaaacttctgcgcgcgagccttgcgcttctccagctctgcctccagatcggtctggggcagtcctcgcgtgtaatcgacggcaggcttctgttcgaccgcggcttcgggctgagtggctggttcagcaacggcgccggtcgtctcgaccttcaagtcgtcggtggtagcgggattttcgtcgagctgctggttggggacagcaacggggttggaaactgcgccctggccaccagcggcaatcgcagctgcgccggtttctgtggatggctcgataaccgtctctgcaggttcgtcgtcccagtcaatgacgtcctcgggcgcgtcagtcttggctgcggcaggagctgcggcaggagcgtcggatggcttgctctcatcatcttcctggaggcgcgaaaccatgtcggccttctttccagtgtgtgggagagaacgagtcttaaggatctcgaccaactcggcgttggtcttcttgctgtagtcggtggccattttgcgatcggggataggtaggctgcaattggtgggagggagagggtagaagcagaagtgattgtgataatgatcgaatcctgaatattcactgcaaaccaaatcttatacgggataaacaaaggaatgaaagttggagtgctgaaaaaagacgcccagagacgcgatctcacccagtggaggtccccaggtgcaagtacaacaattacataatcgaactagaatgatcccattggccacgtgggcaccacgcaataaagccagatccagacgccgacttgtttatttctcgagattattcttatattcaacaacctatattcttcaaaagagtacgatatccggatctaccgaggcagctagatggtgtggcatccttagaaatctagacgatgtttacgtccacaggttgtacacgatatatatatctagcgatagcataatatcgagggatcggcgctgaatacctatgtggaagtactgaaagctctaggtgaacatacaattgagactcggagctaaggaccaatacaatatgacgcctcttcaatgtacgctcgagctttgcaaaatctattttcattgccagctaggttgcttcatgcagcgatcaatacgccacactgcagaggctgttggagtcgagctggggattcaggcgaaggcaaagagcttgtcgagaatttaacaggcgctttaatccccgaatcagaggctgacagatgtacaacgtacgatgaaccacgacagcttgttgggaatagggatctgcatgcactgcgccacaagagaagcaggctactccgtacatcacacgccacattgtttcctcagacgtcgcatgagctactaccataccgttctagggttgttatcaagatacggagtacaaattagacgaaaagcacacgatagttcaattcgttcaatcgatcaaaggaaggatgaaacagaaacccaaccctgcgaaggatactcccgtgaccagtaaaagttgtgtcggttgttgcaagctcttccgccctcaagtatgtctcaaatttcaacatccttccgctccagtcgctctaggaatcggtcttttatcctgtcgagtcgactcaagatatactgcctgttctgccaccccaacgagagtcgtagaagcttgtcaccactaagatagacacgttgccaatccatagcatccactgctgggaattcatcactgcgtagacagttgtcctcaatgaatcgacgtctccagtagctgttcgggatcattggatgccaattcggaaacactaaaagcagggcgtggatgtcctcgtgattgtccagatgatctgcgatattcaagatgagttctgtcggaagaaacacattcctggtcttgaacctagcttgggatcgtcgggacattggatgtgtgggtatggagggttgtgatcttggctcaaatcccatcttcctctgcatggtgtactcggttgtgtatttggtgatcacgtcgttcaagcaggggtcattcaaaggatctgcgccgcgaaactcaggaggcatatgacttggacgcgcatcatccttggcacgaaatttctgaggatttagatacaagcctgatgttaaattgtccaataacttgaaccattctagccacagagggtatgtacctgttggatcaagcaatggccttgtgacatcgtatggatcacacattgcgtggaggaagatatccatattcttcttgatcaagtcgacgtcgagcattcgagtcatgagcttccagcatcgttcgtgcataggaaatgctactgaatatgttagctccgagacgaagttcggatttggaaaggcgtgttgaccatcgctttggtgattgcacaaaatcatgtcgttctcattatgtgggaggcttatttgatgcgtcggctgaagctcgccaacaccagagagatggaatgaggatacatcgtcgtacatcgtaaagaacactagcacaacgctcaaagttagaacaaatcgttcaacccaggatgttagagaaacacttacaagctcggagcatgcaagaccatgtccacatctcatcgaagtgtacgtcgtccatatctgttgatcttccgtggatccatggaccattcgagaaaccgtcagcgtctttcggtgaattgcgatatatgagctcagcaatatcagtggtcgaaaagctgtaaatattctcattgcatagattgcaggcagtatgttgatgcagattaattggccctggagggatggttgacactggagggagggctagatgtcttcttccccgtcctcgatgtcctcgcagtcttcgacgggatctttgacgggccatgctgcttttatctggatacaagagtatccagagagtgaggctgatacttgataaacacaaaggttccttcacggtgtagaaaggggatgaggaaaacagagatgagataataatgaggatatagattacagggagagagagagatggagagaggtagggagaggccggcagatagaaggatgtcacctgcaaattcctgaggcagttaccttagcttgagcctcttgacagctttgatggaaattgacagattataacaaacaagtatgcagttcttctcctttcaagatttctattattgcgatcctacgacaagttacggtagggcctaggacatgaaggatcccgccaaagacatacatgtgggttttggatactcatcaccaagtactgctagatataagaaagaacctggatacctcgtagcatagttcgagacttcgtattggaaagatggaactaatctaacattgattgtcgtggaatgtctcttgaatcctcatcatggctctaaccaacttcttcctgctgttcatccttcttgaagaaaggccctcgcttgaaataaagccttccaatctgcctgtattcatcctctcccttgtcaagtttcattctgaactccattccgtcggccaggaactcactgaagcagttcaagtaggcgtccgtccactccatccagtctcctaatccttgcatcatcacgagatcgctcgtttgctgctccacttccttgtctggctgggtcacccattcaaacaacttcaggttcgggatcatcatggcccagaaaggaacgtcgggtgggttaagttccccgctaaaagatgggccaggggcgacggcgaggatgaattggattcgctggatattctcatggctgaatactctcttgattgtatcttcgcattttccgtgcaggtagacttcgaacaagttgtcgccataaagtatgtccaagcattcggcgctcatttgtttggaaacatgtaaaatgccagtccagtgaggactggtgttgaggaacttgtcgtcttcgatggacgtgtcgcgcgtagaaaccacaggttcaacaccatagggccgatacattgcgcttgtcactctgatggcgcatttccggggcacgcagaagccaaaaatttccaaacgtagctcgaggggtagcgtgaagagtagagacaacgtggaagcgggagttggttgctcagactggtggtctggtggggtctccattgttgaacttgcaaggcaagtttcaatcgcttcttatgtcttggaaaagtgctgactagagagtttagcatcttgaatcgttggtccagcatgttccagcgtgtacttcatcaaccagatcagatcgcgatcgatctcgagacagatgacacggttttgagggggatatcgaaagatatggtaaatatagcagcaaatggataggtttcataaaagataggaatgatgatagtggtctaattggcagctcggccaagtggatgaatagcttggatgtggtggatggtaaagcaaagctgagttgtaggaagatgagcctgataaatagtaatttgtctgaaaagcaaacgaaccatctcctacggcaactgccttgggaaatcgtcctgcggcgactcaaggctccaacgtccagaggcttccaccgttcttgatgttttgttctaacgatgagcctctcagaaaatccccggtcattcacagcccaacagaatacatatgaactggctgacttggagtagaatctgtcttttctttgaaatacctaaataactgcccgtgctgctccaaacaatcaacgttgccatatggccccagcctaacagaactaggcgttcatcctcgaaagactcatctcattccctccgtgattgtaagacccttaatcacatgcgatatcccttgctttcttgaaacccctatcaacttgtcttgattacagcaatcggactgcacagtgttgtagcaactagggtcaccaagaacgacgccgataaatgcgagccgggtgatcgttataaatcccagtggttgtcactgttgtatccctaaaagtatcatatgatgcaagctgacagctggtcatcataccacagcgaaagtattcggccacaatccctgtccaaaggcattccatccctcttggcgtttcatccacgcatcgaagatgtgaaggtaagtgcgacgaagatgaggtggcagcatacggatattgcttatatcctaggagctgccgaggactgccccaataagccccgagattcctgttgataggccaagagctggtggggaggtgggaatgttgttcttgtttcttctttttagtttgttgtaggccggactgagccatatcggtattggatgcagaacctctgaaccacctgggataactgattgactgagagatatctgatttactaattataatatttcagaaagatttcactttgttttcaagataataaagaatcattgagtcttttatctcatatagccaatttggatatcgtcacaaagccggccctaatgcgggggtaacaagtaggctgtcatagtcgcaaattctgagtctatgaatactatttgtacctcaaatatctttatgtatggcatggattaaggagtttattaagctagcaaatgaaaagtctaggtgcttcacttttgtggtcatttctagcggcagacggtctaataatcagagggagtggtaacttgttggtagaagcctgtttattattgcttaggaaaccaaaagaaggtggaagtcaatacaatatactaagaacctcgtgactgaaataagattctaaacaaacatgtcatcttctccaagcgcccggacaagccgaacagttgatgaaaaggagttcgcgtcgaccgggggtagtgtaagcccagtgacacagtgcaacgaggcgtgtgcaagcacagaggccaagtcgcgaggtccaaatattggaataatcatgacgttctgcaatgcagaactaccagcgattaaactggcaagaacagatactacacttgatctaagccagaggcaaagagagctgaagaagaaagaaaagaagaagaagttctgggggcagggccaccttcttataggtatcctacgggcggtcggtttatgccactattcacaaatgaggcaaacaacgacataggctcacttaatgtaaatggtaacgtgatgataaacacatatgcagatatgcctagatagactatgtaacatatagatgtatgcaggtaggtgcctggtattgtaggaaccaggcttaagacttatactggattcatggatgatataaaagaaacagctcacggaagaagaatcagacgttcactatacacagggcttgtttgaagcagtagaggtaaaaaaaacaggcacacaaaggagaaggacaagacataatagcacaacgccatgggaagaaaacatagagcatttagtacacccaagccagcgtcggaagttccggggtttacagatcacattgaggaaaataggtggttcctcttctctgatttttcccctggcacaggcgaatctaaccatctaagaggatgccatggaaaggttttctttgggtttggtttttcttttttattattgcgttgccaataccgtttaccggtcaacctcaccgaacacaagatccatagtacctagaaggaattcaatgttagactggaataaaagacaacggaataaaagacttaccgataattgcgacagcatcggcaagcaagtgaccacgagacacctgatcgaaaccacccaagtgggcgaaaccaggagcacgaatcttgcagcggtatggccgctcactgccatcactgaccaggaagacagccatctcacccttgggggcctcaatggctgagtaagtctcaccaggaggcacacagtagcccttggtgaaaagaaggaagtggtgaatgagagcctccatgttctccttcatggcagcacggggagggggtgagatcttatagtcctccacgcggaccggaccggcgggcatcttgttcaggcactggtggatgatacggagggactggcggaactcctccatacggcagaggtaacggtcgtagcagtcaccgttgacaccgacgggaacatcaaactcgacctggtcataggcatcgtacggctgcgacttgcggatatcatagggaacacctgatccacggagcatgacaccggtgaaactcatgttaagcgcatcggtagcgttaacaacaccgacaccctgggttctggccttccagatacggttatccgtaagcagctcctcggtttcgtcaatgcggtcaccgaactgagtggcccactggtagatgtcgtccaaaagaccaagggggagatcctgcgacacaccaccggggcgaacgtaggcagcgtggagacgggcaccggacacacgctcgtagaattcctaaagcacccgaggcgtcagtaaataagacctggccgcagaggctttgcagctgaaaactactcaccataagcttctcacgctcctcgaaaccccacaggaaaggagtcagggcaccaacgtccattgcgtgggacaggacggacataaggtggtttaggactcgggtcatctcgccgaacaaggtacggatccacttggcacgctcggggatctcgacgttcaacagcttctcaacggccaaggagaagcactgctcattcgtcatcatggagacatagtccaatcggtcaaagtaaggcagagcctgcatataggttttgtactcaatcaacttctcggtaccacggtgcagcaaaccgacgtggggatcggagcgaatgatctcttcgccattgagttccagaatcaatcggagcacaccgtgagcagcgggatgctgaggaccgaagttgacggtataatgacggatcttgcggtcgatcccttcggccttggattcaaggccagcagcatcggggtgctcgggagcacccttgttggcgacggaggtgaaggtcgggtcggtcggcacaagtcgtgtggcctggtagctagcagcctctgcgtggcggcgaggaacagaggtggctatcgagcgggaacgaggaatggatgtgttgagcgaggaggggcggaggcagagccttttgggcgcattgcccgctaggcgggcgagagaagcggccatggaggatagaagtggaggtccaagagggaaaagaggggagatgatcctcaatccaggcgcattcaatgggtggatatggctcgctacggggtagggaactcactgaaggtctcaacctgggagtcgcattttggctcgtcacgtgaaaagccgccgggtcatcagccgtgcgctggttggcctgaaggggccactatactgtgtgggtaagggctccacactagcctttctttggtttagtgccatgcattgctcacataatcttgcgattatggattacataatatatcattatttgcgcataagaaaggcctcgtttctgcctcaggcgaactagaaaattacttcgagaaatctctcttatcggtgatcgcggattttaccatcaaccttcaccagaccctctacagttgctcaccatggcgcctcttgttccctcgcaggaggagctgcagcgccgccgtgtatgtctccaacaatgattccacgcagctcagaatactaatcgtcccagatcatcggcatcaatgcggaaaccgtcaccaacatcccctctacagattttcctggtcactggcccggagagtcgcatgggtgggcactcgatgaattcaaggaggtatgtattggaacatagttaggaaggtatactctactggatttagtaaatcctgaccatttactccaacagaatttccaagtcgaattccatcgcaatgaccggttcgaggcttccttctcgctgatcggtctcgacgcctcagtcgccaacgctttccgtcgtattcttatggccgaaatccccaccatcgccattgaagactgcttcattcacaacaacacttcagtcattcaagacgaagtgctcgcacaacgactgggcctgatcccgctcaagggttctgtcgagggtatcaactggatgcactggtataagaaggcgtccgaagacggtaccgaggaggaagacggcccctgcgacttcaacaccattgtgctccgtctcgacgtggaatgctacaagaacgaatacgcagacaaggacgagcaggacccccgcaagctgtacaccaacgcccatgtttacgccaaggacctcatgtacatgcctgtcggtcgtcaggaacaattttttgtcggcgacggcgctatcgcacctgtcaacccagacattctgatcgccaagctccgtcccggccagaagatcgagatggaactccactgccaaaagggtattggtgccgatcacgccaagttctcgcctgtggctaccgcttcataccgtctcttgcctgaaattaagatcgagcgtccaatcattggcgaggatgcgaagaagttcgccaagtgcttccctaagggtgtgattggtattgagcccgtcacccctgaagaggccgcgcagcgtggaagtggatacgagggccatgccggcgagcagaaggctgtcgtgaaggatgcgtttaatgatactgtcagcagagagtgtctgcgccacgatgagttcaaggataaggtcaagctgggacgggtgcgtgatcacttcatcttcagcgtggagagcaccggtcaatttgagagtgacatgctcttcctggaggctgtaaaggttatgaagctgaagtgcaaccggtggaagaggggtctgaccgatttgatggcttgatcaatgggtcttttctctgttacaccttactatatgcattctttggcgttggatttttgggctgcctttgcgctgtacatttacgaaaagtcgatcagtgtttcgcctcacgaggtggagtctagatgtgttaattgtcttgaataaaagcccaacagctatcttttgaattctacacatttaactaaggctaatcatcccggtcataagctatctgattgtcgtaattctcacatgagaggcaggataagattggtcttatttaaaatgaagacgaaagcggaatgtggtagtgtaggctggatcgctgacagcgacttcttcgccatcctcgatcaaatcggccagcttttttcccaagtgaggtcgggtcatttcctccagctgaggtgggaagcgctgatagagggtcttctcttcagtacgcatactaggcttcttcaattgggcctcggctctttccccgagactgtcgatgaactcccccagggtcatgttggggtccacatccatcttccgggcaagttctccgcacacgggacagtcgggctttttctccgcctcgaaggtgtaggtgtacactccttcctcgccagcatacatcatgtagttggaaaggaatggattgcagccagtggcgatcttgagcacttctgaagttgtggaggccgcaatgacagcgtttgttgatgcgatagccggaatgatatttttgaccacaccctgggtcatctggaaggtaacaccatggatattgaaatgctgggcacgttcgtaagcggcattgtatatccacgatatgtgttccatgttgtcgctgtcaaaagtatcatctttgcgcttctcttgccatgcgatctggtgcgcccattcaatgcagtgttgaggctggcgcgggatggtggcaatagtgcagagaggaactgctggacgaggtgcgtgcatatccagttggcactcaatgcaagatgagatagagggtagaatgacacgggcttggcccttgaaacctggttgacacatcagtaacatgttcttggctaagcttgatgatataggtgggtaccttcagttccaccatcaacaagtggcttcagactcgtagggtcgtcttcatcgaccatagagatcaatgtggaattgatccagcgtcgagcttcgatactgtccaagccacagatgacaatattgaactgcatgtaatagtcttcatctttatcctggatcttgccgacgtagggcgtgatcttgactccttttactcgcttttgcacaaaagcagcggcaacttcggctttgggctttccgatatccgcctgacgaaacagaaattgccgattgagatttgatatatcaatggtgtctgtcgactgtgagcttctagtcttggtattctgagttgaaacacatacccatgtcgatgacatgaatatctttgaatcccgacagtgcgagattctttaagatctcgcatcctaggccaccagctccgctagatttcagtcagtccctcatcttgagaataccacaactttgcgaggttgacaaacatcaccctaagactcacgttagcgaaagtactatccccggagtgaatccacttacaaaattttggcagattccaaagcattaataggctcggggccagggttccagtcgtcatctgtaaaagggccacgtttactcaagacattgtagaggtgcttcctgtggggtattagcgcagatcgaaggtctcaagggtcattcaacgcaccatcgaccttgttgatccacgtagatcggagtttctggggcatctgaggttcccacatccacatccatcttgataggctcctgttatggacaactggtgagagtaaataggcgcagtatcaagtcgcgttacacagattaacgcttgttgaggtggatggcaggcagagtgagcctgatgagagtgatatcaggagcagatccagttcagcttttggtcggatcaccaaagtattcaagttactgataatgaagaggctgagttgacagcatcacttgcgcgtgggctgccttggggtgactatggctgactaatctcaggcccgcctattgtaatcctcaccaacctctctttttccccgaagtgtattcgaatcgataatggaaggccttctgacagcagtgaaaactgtcaagcgagattcagatgaccttgttacacctgctgtcgaatctcagcttgctgatccgccagtaagaaatgacttcgatcctgaacatctatcatcacgtcatatcatagatctacttaaaagcagtcctgatcgtgaacaactgtctgccattttggcagcccttgatcctttcagcaaatccaaaacttcaaaggacttcgacctccgaattgcaagtcccgtcacagcccagattcttcaattattagtcagcatcacgattccagatcattggggatccctagatgcaaaagacagcaaagggaaagacgccaaatctcgagcagcattattgagatgtcttagcagcgtcgcgggtctcggttccttggtggctcagctacgatctttgatcaacgcggcccgtgcttctgcccagcaagccaaaggttcaagcagccaacttgctatccgggatctattggctgtgcttgctgctttgctggagccaaaggactttttagcccgtctttcttctgatatttcagtcatttacgacagcaaaactcgacagcaagtcacctggagagagcttgtatccctcgttgctgccggcaaggttttatcgacagcagccgaggctcttactgttgttgacgagtcaagatcagtatcttcaatctcctgggttggaaatggttcccagtatgcatcatggcttgggcgcaatatttcttatatggtggcacgactagccccagataatgaaagcgactgggcctcagttgctttgttgacagggcgagccttaagccttggatatacaggtgaatataaaatgatggccttatttgaatcccaggctgacgttgtgcagatcagattgtcaaagaaatctactcggatctacttgttcggcagtccttgctggcgcactttggaatattattagaccatctcagacggacggagcagcttgcagttttagaagcgatcttccgtgatgtacaacgaaggtacttttcagatgatctattgggaacagtgggtcagtcaatcactacttcagaacccattaaaggagtggcagctttgatctccgccgtcatctcttcccagccagatttggaaagtcaagttgtggattggctctcaaaatcgcaaggtggctcaataaacacgttgggattacgtcgtgcactattagctacttgcagcaagaacgatagtaagttcacgttgtcgaaggaaacgacaacggaactaaccgcaacagatgtgttgaaggcactgctcatacgcagccttgagcaatttggagacaagttttctatcaaacatgtcccaaatatggtccagaatggtttgtcaacagcccacagtcctctgctcctaaaatattagcctctgacattgaatagcaactgcacaagtgattcttcttgccgctggccacctctatcggctagatcaagcgcaagtgaaagaagtaggccggtcaggagcatatctcaacgcagtctccaatcgactcgccgcgtcctctaacagggcacgatttcttggcatggtcgttggaacaggaatatctgaactcattgaggaaccagacaaagtgctgaaatttgacatagaggaaatgcggaacgaggaagccctttggtattcgcatttgacaaaggtccaagatgaggtcggttcgcctgaatctatcaaaggattgcaagaggtattgccagaaaaaccagaactagtccaccccaagccttcacaaaagccaaaggcacaattctcccgccagcatacaagcaagattgttgcgattgaagaagtcgatgacagtggtgaagaggaagaggaacaggaagatgacgacctcattccgtatgaaaagccagacgacgatgcatacgattctgatgacgatcctacgttggtccaacggaataagccgacagcgcctgtgtaagtacagatcgcctgctgatatggatctcgctaacaaatctaagatacatccgtgatttgatcccatatcttcgagacaacgaaaatgtcgagcgctatcatctcgccatcaccactgccccatccttaattcgacggaagataggattcggaactgaacttgctgagcagatcgaggagctagctctgactatcgtgggtctccaaaatgacaataatcatccgtcattccatgaatctcgcctacagagcatgattgcattgattgtgtccgagcccttaaaaatgggccgctggtttactgccatctacttcgatggagacctttctcaagtccagagatctgctgttcttacagctctgggtctgagtgctcgcgagttagccggtaatggagaggatgatgccaaggcactgcatctcccaactactggcgatacctcattcccatccaagcggctctcgcctgccctagaggcgatgtactcaggagcaaatgagtctcctattgcaatgctcacccgggaaacggcccgcacatccttggaaccgctcgcagccaacgcagcagatacaatgactggccccaatgctctcaaagtgcgcactttctcatctcgtatggaagtcgagaagaaacgccagcagcgtgacaccaagcgccaaaatgctacaatcaaggatctgcacaaggttcttgccgagggtttcttcttcccactgcagggcagatttgaaataatgatgctgcagtcttcgtcgtacgttttacgtccactctcaaaatcatattattaacatcgctccaggtcctccacaccctcatacaacccattcttcatcccccatctccttacactcttcctccaaaccctctccctcattctctctacaacaggtcctcacaccccctttctcccaggcctcacccatgaaactctctccctcctcttatctctacacacatcctcggcatccagcgaaccaaccgtcactgccgcactcctgtcacttttcctcgctgtggtggatctcaatattgcgtctggctcaaatggcgagcagcgtcttgtcaccgaatacgccacccaggtgatcgagctgcgagagtgggcttcccaggtcttcgaccggacgccgccttcggctgcgcgggctgatcctagctcagccgttaccgacccacaggagcagatacgcacccttgctgctggtgttatggtgcggcttggggaggtgatagagcggtatcagggtcggctgatgggtgttcattctggttttaactattaggcagatgacggaactatgtgaacattattgaaaatcccacgaacgagtacagccatcaacgcgccttggtcttttacatttcaaggaagaatgtaaatcgtgttgttccctttcttccgaaaatgacatacatatgtagctatcattatgatcgctgaggcgtagattggcccatttactccgccttgacaaagctacccttctcgatggccgcctccatcatccgatcaccactaatgatgctcgtggtacatataataatcttcctccgtggagcctcttgcgcagcaatgaagcgcaacgcggcgatctcggtgaacgtgataccacccaggaaaaagacatacacggtcttcgtagctgagttaccgctgagcgtttgacgagcccgcacagccttatcatcacccttctgcacgatactgaaagtcgcaccgcgagcactcttgacaacgtcctcgaagccaagccagccaggcgacgttgtattaggggtgttcgaggcggccggcgtacctcccttgatcaaggataccatataggatttttgtagcacacattgaaccaggcggacgctgaggggcgcaaagccactgtacacataagaaatgtcgttcggatccttttcgctgacctcctcgatgacaagacggaggtttttgcgcaggtacccgtagttcgtctttgatcctgcttgtgcaccggatgtagggagcagcattgtcgttgctgaggatctaggctggagaagttccattttctctagcgcccagaatgtgagaaggtgctggtggccgtacgcttgaaggacctgtctcttgaaactttctaggtcgcgggggcggagacccccagacatgcaggactccaggcacaggagccgtagcacagtcttaagtggaacatctcgagctatcagctcttcgattgtctcgtgctggtatgtggagtcggcaccggctgcattgttttgctggacttctaaagttttgcggaaggtttcggagcgggttagtcgcattatctcttctgcgaggttggtatgggttcgaagactctggtgctccagctggtacgttggtaatcggttgacaaactctcgaagctcgcctgtcgttttagccgtgtggcggctctcgtattcattttctaagcggcgagccaccttattcaggatatcgcccacgattgcaaagtttgcatctcgcagttggctgaacaactgatccgaggaatccagctgtatctttcttttcagcccctgcttgacttgctggggtgccttggatgactcggactgtggtgtgggagcaggaccgacaatgcttgtatcaacgtctgcctggttgttcttaataccgacatattcatcaattaagccttcataggtgagctgtgtgagaaggggtgtcccgaagtcgacgtcacggtctatgatgatcaagttctctacgctcgcacttggcaacaggcctcgtgcagagggatcagtcaatccggagctgtcctctgcatcaagttctttcctcatacgcaatagaagatctgctaagcgccgggcattgtccccttttccaacaatgcgtgggaaatagccatggcgctgctggacacccatgagagccttagcagaatggaagatacaccctggatctttgtgctgaataggatggtcagaaaatctctcaaatgttagcaacctatgaacttaccaagtacaagtcttcaaacgactcatccagttctaatgacaagatgtcttgttctagaggcataaaataaagaggaagctcggcgatgttcacgtcgccgatgattcctgcctcctccaagacagaattgctcataagcgtccgtcttggagcgaagaagatggaaaactcatgttcaacatttccattattctgcaagcgtttgatttgttctaagagaaatgtcagctcatcctgatggcactcaatcagagatagcaggaaagggccctaatgaaacaagcttggaaatgttgtaaaatagatatcgatatagggaacatttctccagattacatagagtagaaaagcctctgtataatctgatgatggcccatcatgggcccaaatgaaagagatccaatctgacaagccgacaggggggcaaaagagacaatgtcatacctgccacaattcgaacgtggcgagctttctcgccacgaacaaggaatacaacattgcgttgtgatgagtcgatgtttgcattttccagcaagaagacccggtcgacaccatactcttggagcacggagaacttgacgaatagacccactgggccggccagttcctggcttatcacgaggttcttcttaccccgggcctggagaatagttagcgcatataattgcttcgcttcgctccgcaatcagaatagaagatcaaggaggctgtgctcacgccttcgagtaaagtcaagagatccctccgcgccttgtccctaaaatagtccgcatccgaccccgataaaggagccatttcatccaggcagaggcaatgtcgtgagccaaaaataaacagagacgttgaagtgccactgcgcccgcattgggctagcactgccactgctgatgtaacatgtaactttggtattagtatcgttatcactgcgccatccaccatataactgggtggtaaatttggtacgccccttgtatacatattaccatcaggcggcgttctcgaacatctaactagctcccctgaaggcgtctcatattaattctttcttttgtctcacttcattctctttctccttactttcttgtactcccatttaccctcgatcattttaatcttattcaacaaatctttacagcactatacccccacccacgccatgggtcttttcaagaaatccgatggcgacgatgactccagccgccgagcactctttggctcgcggaagaaggacaagagccccccgaccccctccaacccttacgctcaaccaattccggtagacccatacactaaggccaagattggcgtgggtgttgcccccttacctgccgaccaccccgccgccaacggcggcccccactccatcccccccgacaacaagtacgccgccaacaagtacggaaaccaaggcggctacggcagtgatcgatttggcggacccggcgcaggcgccggaccctcaaccggaggctcgcgatacggaagcggtggttacggaggtctgggtagcagcgatcccaatgaccccgcggctgcagactccgctcgcaacgagcttttcggcggcgccaacagaaaccgggcaccggacaacgcgggcggcccatcaccacccccgtactccgagggtcagaatggtcagaacggtccaggaccgaactacggtggcggcagcaatgagtacagcatggcgaccttccaggatcgacagctgacagctgaagaagaggaggaggaagaggtccaggcgacgaagaacgagatacgcttcgtgaagcagggtgatgtagcatcaacacggaatgcactccgagctgccgcacaggctgaagaaaccggtcgcgccactctcgcccgacttggtgcgcagggcgagtccgtccacgacacagaaaagagtctggacatgacggccatcgaaggtcgcatcgcggaggacaaggcaaaggagcttaagacgctcaacaagagcatgttcgccgtacacgtggcgaacccattcacggcctcgcgacgccggcgcgagcgcgatgagaagatcctcaatacacaccgtgaggatcgtgatgtccgcgacggaacacggtccgaggcgcacgcgagtaatcagcgcatggaccggctgttccgtgatatcgagcgcgatgccgcgaaacagggcaagggcaagaaggcgagtgtcaccgagcgtgccaagtaccaattcgaggcggatagcgaggatgaggcaatggaggacgagattgaacagaacttggatctgctcagtggtgctaccggtcggttgaacggtcttgccaaggccactggcaaggagctggatgagcagaacagacatctggagcgtatcatgggcaaggtgagttttccctctaatcaggtgtgggtatgaagatgagactaactggctatagagcgactttgtcgacgatcagattgccatgaaccgggccaagctggaccggattcgttagtcacgttggttgttcaagacaaaagggctgcgatatgcctggtgctgtcgagctcagtaattttctgcgtacgttctgtccgttgggcatggatcacaaattggcgttaagctggttctgcattatctgccgtggtcatatcagacccggcgactagaatattagttgaacattaaataacataatttcattgattcattctgtacacttgaattgactatggcatagggaagtagccggaccgtgcgctctgtgacgcctttggtatgcaatatgagttggatatatcgtccaatactgccttaaagccttgagaaaccggagaagtcctgatattcagctcctcaaacctcaatcgcaaatccacgaagatcgacatcccaactgcgggggagcgcggggagtacccggagaatgaacctccaccgagccctaaatgtaacgaagtataaaaccgcactcccaccaaaaagcaacattaaccaacaaaccactacatctacaaactacattaaatccagcctacacccccccaccaaacccccatgcctctcccccaaaaaaccgacatcctcataataggcagcggcaacgccggcctcagcgccgcgctctcagccgcgcaaaccaacccaaccctccacataaccgtaatcgacaaaagccccctcacctgggcaggcggcaacacctacttcacagccggcgccttccgcacaacccacaacggcctcccggacctcctcccactagtcaacaacacggacgcaacccaagcatcccgcatcgacataccagtctacacagaacaagacttcaccgccgacctgcaacgcatgaccggcaaccgcaccgaccccgcactatcagcagcgctggtatccgactcgcgcgccgccgtcggctggctagccgccaacggcatccgcttccagctctccttcaaccgccaggcgtatgaagtcaacggccgggtcaagttctggggcggactcgcgctgaaaacacaagatggcgggaagggtttggtagaagatgagctgcgcgcggtcaggaacgccggcgtgggtgtgttcttcgataccgcggccacggggctggtgacggacccgacgagcggtgctgttatcggcgtggaagttgtccacactgacagagctggtgctggcgctgacacacacaggaacaagaacaggagaaccaccatcgctgccgacgcggtgattctcgcagcaggtgggttcgaggctagtccgcagctgcgtgcgcagtggctcgggcccggatgggacggcgcgcgcgtgcgcggcacaccatacaacacaggcgagatgttacaaatagcgcagcgcgatgcgtcagctaaaacagccgggaactggagtggatgtcatagcgtggcgtgggacgcggacgcgccgacggagtcgggcagtagggaggtttcgaacgagtatacgaagagcgggtatccgcttgggattatggtgaatcgggatgggaggcggtttgtggatgaggggtttgatatgcggaactatacgtatgcgatgattgggcggcgggtgttggagcagccaggacaggttgcgtttcaggtttgggatgcgcggacggtggcgtggttgcgggaggaggagtatcggggtgaggtggtgaggcggattgagggggcttcgttggaggagcttgcgaggaagtgtgtggatgttgggcttttggatcctgggcggtttgtgcagtgtgtcaaggagtataatgcttctgttgagggggtgggtgggcagaggaggtgggatccttctgctaaggatgggcttgctactaaggggctggctgttcctaagtcgaattgggctttgccgattgacaagccgcctttcctggctgtcaaggtcacggcgggtatcacgttcacttttggggggttggctgtgaatcctgagaccgcggcggtcacttcggagacgacgggtgatgaggttcctgggttgtattgtgtgggtgagatgcttgggggtatcttctacgataattaccctggtggaagtggattgacttctgggactgtgtttgggcgtcgtgctggtcgagcagcggcggagcgagctgggaagagaagactagaacggctgtgatgccttcgaagatcaagggtttacatatcagcatataactaatgactacaagtccaattaatgttcagaatgtcttctattgattagaatatatgtagtagcgacagtaattgactcgaccaaggccaggcccagccagtatcaaaacaataggaacatgttcttcctatgggtatcatcaccaacaaacctaaaattggaaacccatgcactggaaaggcgatcgaggaaagaaaaaacaatgtaatagctttaagccatgcagaaagcaggcaatggaagattaagaagcgaaaacaagtcagggtatggcctgcagagaataaaaacatcgaatcatcacaagccccatggtatcgagaaaaaagcacaaaggtgacgcccagtctagggaaagaataagaaatcaaatcaaaacaacgcatccagccggaaacctctatggtcataacgtgggtgaaacaaaggaaacatggaaatatgaaagaaaaaaaagaagctctctcttgcctgtcgccctcgaacggaacccattatacccataaatcacagaccgttttggaagggtatggtatgtataagcgtttctctctccgggaaatgtttgtcggaggtgaaatagaaaaagggatgaaaaggtgatccatgctgttgtacaaggagacgagaaagccggaaccgtttggatagacatgccaacacagttggtgcatgctcagacggagaacgagtttgtgaagggtggagattcgctttaggcgcgagggcgtaggagagggagcactcgacagcttccgtggaagatgtagtcgtatgaaagattggcagattactcgtcgtcatcgccagagccgggatccttctcgcccttgtggaccttcttgtgacggcgcaggtttgagacaacggagaagtgccgcccgcagccttcaacatcacacgcgaatgctggaaaatgtcagtatgattcgaatgatttagttctcacggaacaataaaaaaactcacgcttttcgccagtgtggctgtacatatgcgtctggagcgaagatggacgcgtgaaccgcttgtcgcagaccttgcacttgtgctttttctgggtgttggagggcatcttggagctgaactggctcatcatcgattgcgggccagggggagcactaccggccaaaaggctagtgggccggggaagagtgcgcgattcgtatgactcggaagttgtggagctgtagtcggtcacggaggagtcgacggagcccaccgaggcgctgtagtaggggtagttgccgccggaggagatagacgaggcggaggattgggtggaagggaaaccgtatgaatcggccgagcctcgcgtgccgcgaggaccggggccgtagatgttgcgcggagtcagatcctggctgagagcgaccattccgcggctggcgtcgagggcatcaccgaacgtaggggcggaagctgaagcgccaacgcgagcggcgtctctgtggattgtgtaagtctttgcgattccatgtaatgcagactcgaatcaacttacgagtgcgagatacggcggccgtcttgcgcggatgggtgaataggggcgtgggcgtaggcatagctggaaggtgcaaagctgctcattgggggagcgctggtgtaggaaggagcctggtcgaaagttgtgcgcgcaacctcgtgttgcattcccattacctcgggcccataggcggcgctcgcgtagctggacccggtcaccattgacggggcagacacggggatgttgggatagggcatggacatggcggagcggttcacttcctcctgcttgacctggcccagccccatgctggcgccattgcccatggaggtcgcatagactgggggcgtcgaatgcgacgaactgtgtgcccacgggtctgtaaactgtggtggggtgtgatgatagacattgtcgaagctcatgccgccatagggacggttctgattttccataaccatcgtcatagggaatagagtcgcgaatcgatcgcgtgtagaactgtatagagagattgaagatcgagtccaaaaagtaatggaatagagtgatcgtctgtgttgatccggaggtatatgaagacaaagtgataaacccgatgatcaacaattattttatatttttaagggagaaagaaaaagcagaaacagtctggggaaggggatcggcgaagcttatgaaggaatataaggcatgatcccatactccaaagtgccactgacgacgtcccgtcgggggtcgcagatcgctggaaatgataataccggtatttattattttattatttttattttattcgaataatgtttttattgtttaaattgtttataattgtttataatttgagtttttcccattttaaggattttcatgactacaaattcgggatttcttttattttcccctctcgggattggtggacagacctggattagggcacaagtggtccgcaccagttcctcggggggacaattcctctggatattgaccctaagcatactagccctcctatttacgctttgtcaatcagggtctaaaatatattaattgcttaatcaactaggctgaggaatggaagatctaaagaatcggccatcaatgttgacctgggaatgtcccagatgactccggcatcggaacggccatcctacaggaaaataagcataaccagaaatattccctaagcttataatacgaaaaaggagaaaatcatgagacgcaaaaagcagtcggtgacctcagaatcaaagggggtgtagactaggggaatgttcaattggagactagccgtgatgaaggctgtgagtggtcgaactgtgccgtgtctgagagacaaaagcggaaggaaatatattttattgtgtaaaaacaaaacaaaagggactgccaagaaataaactcaccaaggttcgccctgagtccgctgtttcaatgtagcggggcagatcccagtgtcaaagggtatacccgttgccgtgggggttaatatgagtgatatagtgatagttcttgcggaatacctctattcgtggctatcaccgttagttcgagtagcttttatccaaactttgatttcagagacatggcttgagaccaaccactatcgtagaatagagtctccattattggcaagctgcaggatcagaggcacatgttctgattctttggaaataaaaagataaaacggaatggcttaagccatggagggggcctatgacacggcacagagagggtttagcgccaacccgaccttacatagagagaaggcagtatcgaatcactagccgccagcattattgactgtattctaattccatcgagtcagggaatccggcaaaaatgcgatgacgttggactaactcgagctcctgtttcagaagtcaactagttagagtagtcttggttttagttttcgttttagtttgagtatatctagatatatactgtaatccgatggcgcacacgggacagtctacggctacggagtacctcagagcaagtcccaaaacacaacattcatcacaccgtttagtttagtcctcgcagaaaccaccgcatatagatacagatacgaccgtgcaatgagctcgcccagcggtacaccaaaaaaaaaaagcctcctgcaggtagaaggcataagttccaataccaacgctgccattagccgggccatgcgagctgtatcacatagagcccgtcctgaagtccacgcctaaggcacccgggccaacagaaaaccccataacaacctcgtattgggccttgataatcaagagagccacgggctgcaagccatgttttccttttctcctgtattaggactggggcagcgacgtcagaggggcggaacagcgcaacccagtgggaaaacgggtaaacggccgctttggtcatagttggtgggcgccgctcccgcaataggtcgacatatcacaattatcacaatctattgacctttttttttttccccttgtggatttggaaatggaaatggtcatggtcatggcctcgtgcagtggaaccaacagattctcctctttctctccgaccaaattttcctattcaatagtgtgtgccaatacgcaataaataaatttccgatatgggtggtctatggtccccgaggctcggggtttgatgtcacccatagaaagttcaaagaagacatggttgatcactcaaggtacaaggtacaaggtacgaggggggaaacagatcgtcgaccaagagccgaggaagaggctgaagaaaaggcgacataccctagtcctcctccaatcacatagtcctatatccgtctccatcccatgattggcgtttagcccgggggggaggaagccatctagcgtaagaccgaagtacgacgtacatatattggacatcccgtactccgtaaaccacacacattcgaggattgattcaggatcaactgccgctctcccggacgagaggacaaaaacatgttcaaccgtgggctcggcacaacggagatctaaccgggaagcttaggagcagggagccaacacaaagcgaaaaaaggaaaagaataagcgcagttccaacttttcctctctcccagcttctccgcattccagtttccaaccatggcgacgccacgtcctttgccttttcgaaaaacttggagtccctacagaaaccatggaaaccggcaattaaacaacctgtgggccgtgggcaactatccggagttcggtcctcatccgttcacctctgctcagatgcagtatgggggtatccatggatatcgcggatgtgtgcctcgaaggcgaccgtgggtcccgggttactggattaagattggagtcgcgattagctttctaggtatgttgtatcagactacagtttatccccagcactttagcctttggatgcgaataaacatctctccagtctcgccatccttactccgtagtcccgtgtctaggcggtcggggtggacatccccccaaaagagaaaaaaaaaagaaaaaaaagagcgcaattgggcagtcagtcgggtacccaactgccatgtccacattgcaccaagttgaaagcgaaaagtgaaagggggcaaaaaataatacataggttcaggttacttcagcttcaaattgccccattctgaaaaaaaaaagcccagatatggagcccttgaaattaaaagaggcgcgcacttctcggtctcggtcagccaacccaacacaacgcaaaaaaaaagaaaaaacaagcaatgcaacaagatgggctggaggctgggcgtgactcccccttttgtgcatgccgtgtttggtggaccgaacaatctcaccggcagaactccgtctttctctcaacgaacgcccactgtgctggcaaaatgtggcgtttttgagatgctcatttttgaggtcgagagtgggtgggggaagggcccggaggggatgtgagaattagaacgtgtgggcgccaagagatggttttgtgttttggggtggatatagcttggttcgtcccgtatctgtatacgccgtacattggcaatggcgtccagtagttcaactttttgaggaaggtatacctgggccataatattgggccggggtgtgccggcagagctggagaatggggtcggctggtactccatacagacctgcagctctcggagttctataggtttgcactttgtacaggtccaccgctgcagaagggcccctagactagacagacacaggggtggagcatatctaaggtcgtgaacgttggaaacctgtgtgagaggacctgcttcaaggtcttctcgcgatgggccgtcaaggggggaagccttgacggccttgacggccctgaccgctccgacacggctcatattaatgacgcgtcttctgggaccctgagaagtttttttttttctgtcgtgctttcacggttttatctgcttttccgagaaacccgctggaaaattcagaaaagggaaaagggcggtcagagattgagatgtgacagttcaacacaggcagatcggagaaatagcgatatcaacccctggatttcgatctcagttgcccatgtcgagccgcttattacctcctcaaggacggagtacgctgtaatcagatccttatctcgcacgttgacgatccgcctcaatgccgagtgtcaatcaggtacccttggccaacaaaggcctgtcatctgcatggggctccgatcttggcagttcccacacggcagatcgtcatgtccctaattcaaggttgactgatcatcgtctcttttgggtggatatgtttctagtagtgctagtaatgagttaaaactcgataatgaggtaaaattggatagcgagtgaaaattcgaggtaatgagtgatccgatagtatgttcgctagtatattgtatttccccgtcacgctcccaatttctatacatagaactgaaacggtgaaccattcatgtccaaagcgttacatccagtggatctgtggatggcgacagacaatccgggtcaatgggacaacccatatggcatccacagcttagcatccacagctaggcagtccctttaaaaaaaaaaacaaaacttattgaactcggccgcccctgattggacgacacccggtatcccgataccggacccctttaggtttctttccacagtttcacactaatccggattagctcggcccagttgggcctagtgtggcttaattgcatggggtccacattcttacatgtttgctgcagagcctgccagccaatccgcagcgtccattggcaatccaggcccacctgaaaacggcagatagtcgatagccgatcttggcagtcgttgatcgaccaattggatcttcagccccaccaggagctgacgcgtgctcatcccgcgcttttaagccaacgtggttatcgactccttggtataggtcgaacaaagtaggaaggttaaccttggattgcgagacttggaatactcgggtttttttttgcaaccgtgatgagtatctttttgctggcttttctttggatgattctacatcgtaccccatagtcctactgacacaaacccaaagtcaaatgaccctcccccagcaccctccccgcaaagcccgttttggctttcgtccccaaactcgagatccctgcgtgcgatcctggttagactccacatttcccgctaggaacactgccactttcagggtcaacgctaaacaacctgaaacgcgagtggggggattcccatacgtacagtgactccgtaatttatattttatattgtcattcctttccctcctgttcgagagagagatcccaatataaactattcttgcattatcctccgtgatctaagccgcaccgagtaatttgtccctgccactagtctggaccagtacttattctgcgattccttatccattacgtagtggggctggtcgagagaatcggaacatggccggagaacctcggacatggcttgcgactggacggtctttagcgttgtcagcgtgagaccaagtgcgcctctttagcctgaagaaacggacttttgccttaataggcgattaactcgactgtttgatcggacctccccgccaccgaagaagaaactttgggccaagtcccatctctgcggttcttgttggagttccccgagaattgacggtggatattggagaaactgcggtgtgcgctgtagcctttccccattcctggactgttgtatcttatggtacaaatcaagcttgctgtctactccgtactcacatacaaccctacatcagatgcatgaagacaagaagtggggaaatcctctctcttggcctatgtcaccagacatcctaaacactgcaggaataccaagacctgagggaggggccgtagtcttagcataaatcttagtgtaccatagccatagcccgtggcccaaaaaaaaggtaatgccgatccaccaagtgtgtgtatccctagctgtgtgcctcaaccgccgtgatggggcgctgcagggtctccgatcccttgcaagattcagaatgttatagtatagtatagtcatctaattctcacagaacaatcatgtcttagctatgatttacgtagcttgctttttggtttattgtcctagaacagaacaataacaacgttccagcattgttaaaagcttccaatcatccgttgcgcaagtattctcctaatcgaaatgatctactacgttacgcaagtcaatcccgcagatcaacataaccttttttttccttagttatctttcctagtgtactccgtagactccgttctctttcacatgaatccaatctcggtatctcgcatgcttgacagctaaacatagttacttgcactttacatacagcgccggatctcgaggttggattgatgcgcgtaacaggccttccccacctctactatacactgcatgcccatatacatacgctttacgccttccaggtggggtcacctcgggattcattccctgcatgtgctactccgtacctccacgatctaaggatctatgaacctcaaaccgggacccatggtccttgcagctgtggtctctggttctgtgccgtgtccaccgcgctaaaagaggaactgatagcttacccggagatgctacggagtagttacggagtacggaagtactccatcgtgagtatgtaataagaataatcaataaactcacgtcctaaagcgggtagcagaccctggaaatctaaaaaaaagaggattccagaccttcccaggttggaacgtgtgcaaaccatggaaaagggtagaaaggggcgttacacaactgcccccttatcagggtctgtgtgttttctttttgacttcaccgttgtgtactccgtagggagtactacgagtacagtacggagtacatacagggaaatcaaatcccctccattccgcggtggttcagtgtgattggggatggaccctgaattcagggggaggctgtgtagtttgaagctacatactccagtgcttagttcgatatctgatatgttgtactctatacattcacattcgcggtagagaatgagtacgtactcgatttatattgaaggtatagtatacaacatacatatccacttacttccatagattattccagtctatactctatatccataatccatattagaataccacatgcctacatctgtactctgtatgtaacctcgatataaaaagaactaagcatgtacaaacgtaattctaaaatggagattccccacacgagccaagagcttacgcggccacttcctgcgccaagtcccttccacggcaagcttagagccattggcgattacatcgcctgcccctcctttttgattactttgtaactcctccggaccctgcgatgacgacttttctggttctggtttctattttttgtgtggcaaaatggggagagggaaaggggagggggttgcccccatattattctcttagctgaatggcttgctggatgttttgcgtaagtactaagaaatataggtttggacttactgtagttagttagttactcgtagactgtagtacttacgtcggataaatgacgtccttatactccgtaccccagactcagaccctgttgtttggagattagagatcttgttgacatcatcgtcggccttggagcgatccctgcctgatcggcccttgtcaccatgcttggctcgattattctacgtatgttatacaatctatagaaacgatcgactctacagaacggttgtttccgaattagagattaaagtcaattgaaattgtagttcgtatatcggactatgaaggagaaggccgttgaaccttggaatgatcgtacctagatagagatatatatcacctaccggaattacacgagagtaagcagccacaaagtatattttagatatctatcacaaacgcttggaatactatgcagtagtcagttccatttttgaattgatgtccacaaatggaatacagttacacttaggcacctcagcatgaagcaataggaaaggcctccgcttccatgcttgcaacataacttcgcttttacgagtatgtctgcattagggtgcagatatagtttaatagtttagtagataaggtaaaagaggttcccattaatattgcgaagacttaatattccattgcagtacatgagatctgatatccatcagaacgaaagaaaaacaccggctagcaaaaacgcacccataaaaatccgtatgaataatacatgagaaagcagaccatccatttacaacaccatccctagacaatgatggacagttccggtcgctccacgtcgccctccatgtccgggtagtaaggaaccatcgcatcggctgcctggacgtatgcatcgttgtagagtctccagtaaggcatgcggacctttcgagcagggtggaacaagccggcccaaacgtagttcataacgataccagtgccgaccgccatccggacggcttcgatggcttcgatgacccggtcgatgacgtggggactggtctcgaagatgttggggaaaagcaggttcagcagatggaccatggcgtcctcgcaaccaagaccgatcacgccgagtgcgacgtgcttaaccgcgctggcagcggtctgtcggtggacttgatcacgatcgacaagggcatcttctagcagcggcgtgacagcgtagacataatccttgcccatctcgccgatgtactcgaacaagaaggacaaggacttgagcacaccgttttgcacgttgagatccggcacccggtactcgttcatcagcgccgggagcacagtgaacggggcacaagtttcggccacgataccgatggcgacagctgtgcagacacgcgactgacgctcttggactcgcaagttgccgagaagagcggccaggacatcctgaggaccaatggccttggcaatgaaaccgaatgtgttgttggccgcccggcggattcccttcttgtgagccttgagcatatccatcagctcaaagcagatgcgcatccattcgcgggcattcacggactcgggaccacggtcggcaatacgaccaacgagatcaattgtgttttcctgcaccttttcgtgacggttgcgcagaatgggggtaagtcggggaaggaggtcgcgaatgggtggctgcatctgggtgataccgaccacggtgacaatggcacgcaaagcacccaagatggagcccagaacctcggggtattcttcacccaggtattcgtagagcacgataccaagcttgcccatgagtgcttcctcgtcacactgcttcatcaccagcgcaacgcgcgagatcagatcggctgcctgttgtcgaacagtgggggacttgttgttcaggcgccagagaatagtactgacaatctgagggatatatgccttgcatcgcgtgccaagtgcatttaccaccgtgccaaatccattgagaataacaaggtcttcgatgctttgttcctggaaggcgaagaggacaccatcaatgaggcgttcttccagcctctcagagatgtcagcggctccaagcgatgcaatcaatttttcgaccgtttccacagtcatcttgcgatatggctcgctttcatccttcaggttgttgacgacgcgctcgagaatctcgccaacacccactttctggcccagatccactgtggtatcgaccacctggcggtagtttcgtcgatcgagtgccatacgtcgcatccagaagcccttgaagaactctgtcaagacgtgctccttcaagtagccggcagtcacacctggagtgtttgcacattgagaaaccaccttcaatacgaccttcttcatttcctcatctggcgaggcgaattctcgaataaggatctccatgatttgagtggtgtagtagttggcatactcttcatccataagaggaatgatgtagccgacagccttgaggaaggcagagagacccttgccacgctgcttgcgggcacccgtccaaagagggcttaagatgtcatcgaaactttcaataccatatgggttcgcagcctccgccaaagaggccagagatagagcggtgacggtccgaaccttagcttgttcatcactgaggttacctgaaacgcatccaaccagctccttgagatgagggagaatggcgcaacccatgagaatagggatgtgctggacaatcttgacaccggtgtgtcgagcctgccaggacttcttactgcgacagacagcgcggaggaaaggaaggagggcgggaataccgagggcagaggccacaacggcaaaagcgcgtgctgtcgtgtttcgcacatattcatcggcgtggtcaatatcaggacgcatagtactgatcattgtagccagaccggcggccttggcaaggtttgagataatctctcggccttcaacacgggcatagtagtcttgatcaatgagcaatggttcgatgacgaccaagatcttatgaacatagggacgaaccagatcatcaagcttgtagaggattcggtcaatgaccttcaccagcaaatgacgctcctggtcttccagagtcctttccatgagcagggggagaatttgattgaaaagagcaccgggaccaaagtcgcgtgcattgtctgtgatctgacgcagagcagtctttcgcatgggtggggtaccgttcttgatcttgagcagcaatctcatgatcttccgctccttcatttcttcgacagtcatgctggtctcatccccaccctccatcagcttaccgaagtaggccatgtcctccgccttgaagaattgaagttcacccacaccggggatatcagttggaagatcctttcctacagactgaacagtttctggctcttgcatcatgaaccctccgacaccagcgttagaaattggtgctggagtggctaagatcctgcgagactgggttcgaatgggttcatatccgggaggagggtcaaggaccttgtaaccttgggcctcaccgggaagcatgatatcgagctcttcgtcagaccagccaacaacttgaccgggcataccaaccccaaaaccgactgcaggtgtagcggcacctgcttgagatggatgcatgggagtagcgagcccttggttgccaacgggggtagcagctgtgagagatggcgctagatcccatctcgaaggcatggattcgggttcctctttgggagcatcgaaacgcgatcttttctctggttcggtagaagaatcgccccatcggttctttcgctttttttcggtagccaccgcgacggtcgaacccgcctcggcgttctctttgtcctgttccacaagtttcaaggtagcctggtgttctgtgacgtcttcacccttctcgagcttctctgcgatcagctgtttcacgcgctcctcttccctctctacctcacggatggccatgacctcccggtatgtttgactttctccttcaacattcgcatgggcattggcagcaaagggatcggcgcgcgtcggggttagggcgccacggttgaatcggcgcttttggtagtctgtctcgcggtctgcgatccgcgccgccttttcgcggcctagcagaatgtcctcctcctcaacgccagttccttgcgccatctcatcaatctggcctctggtagcagtgtattggccaaccagtctgtgtcctccatccgcatcttccatttcttcatcgacatcaacggcgatcgaggtatcgtagcccgaaaacttctccgctccatcccgttcgtacaaaaaggtgtcgaacgattccgtcagggaggctttggttgagttatcggtgcgctgagcagactggtcaaaggtcttggagccctttttactagcagcagcagcattgcgctcggcttgaagccgtcgaacggcctcgatatcggctacaatgggatcagtatggggccaggctggggagcttgcgaaaacttaccgtcagacatggtgataagatgtaaaagtcgcgaggatatgagtgagcctgttttaccgcagaagggaacaccgcagctacatccggattgaaaaccgctgtaacggtcacaataatggtgattgaggatgctgtgttgctagccgcctcgtgatgaaaaaggtcgtgattgggttgcacgtgattcgacacctttgcttcttggattctaaggttgtctattggaatcacgtgcattgtaacgtaagcatgcctttgaaggcggtcaatgacgttggacatcgatgtgaaaggaatatgaaggaatatggcgaacatcctaacaggagggtatagcagcagcccaaagaggccaaaatgagaggggggatattgcttaagggaaatctcagcccctaaagcatttcacattgccatagcactaactcctttgagctaccactactaatatttgattagaagtcgttgatatttctacctagtagtgccattctgggctgttcactctataatgccttgtgtttgatcaattttaacacttttatgttctgagctgtaaatgtgttgctgcccgattgacactcaaaagttgtggcgctgcgagggcgcttacaattcatttatgtcctacaaccagtgtatcagggacattgaaggtctgcatggcctttgctgttcgtttgtacctgaaactaattgtctattttaggaaaaagcttcacatgatgggaataagaccaagaggctacccgatagccaatgacagatctaggctatagtagctgcttcaaataagcgcctgcaacactccaagcttccgtaatatcacttgattagccttccaaggctgacttatatagtagattggaaaattctaatcatacttaatctattctaaggttttccaacatcaaagcgactgtttgctgccggccggtaaacaacaacggtgctagtgtaactcttagagcgccgtggttacatccttttcattctaaccaacacatgaattaaaatctcatttctcatctctccagcaacctttcaagagaagtggcgttgacaacaaagaagccaatgctagcacagcacaccgttaccccggaattcagatggtatcctcagtcaacagactcggatactttcttagctgtatgcactatatagacaactcataggtgaatggtggtatccatttatatagaatctatcattggtcccctcgaaggcctattgaaccataatccactacgccttgaatgcggtttgccttgctacctgtgcggcaaatcttaaactccgagcatgtcctttgttatatatcagagtagccctgccaaatttttattaaataggatatctctccttgcatgttggtttatccttgcccttataccctggttcctattcacagccccagaactagatttgctcgagcaaattctaccatctttctacatcgtatagatccaaactactcgtccaccatgaaactcctcttagcgctgtcattgctccttgtagcggcaaatgtggaaggacattctggtcttcctcatcctctggctcttgcttcctcattctcccaaatctaccaccaacttgacaagatcaacctggggaattgctctctcacaaacgtatcactctcactgaacacgacaaagccaccgctcccagcaccatccacgaacttgactctcaaatacattgcattgggcagaggaacacagaactatacctgcccatcgaatgcttccaccatcaatcccaaagctacaggggctgccgctacactcttcgatgcctcctgcattgcatcatcgtccttagctctcctccacgaagtccccgcaatcatcagcgccactcctcttgaatctgtcgcgttcatggcagcccttgtagcccagggcacgagaagtaacaatatcattattggccaacattacttcaacgctgatggagaacctgtctttgacatgggactgagtggctccaattcctggattgctggtggtaaattagcagctactccagcgccgaactcaacgtcaggatcctccggtgatgttccgtggcttaagctaggatacaagaaggggaacggcattcaggtaagctcgggttgtccataatcggatttgaagtatacatatctgaccgatttatatataggaagtttaccgagttgtgacatcccagggtgatccaccatctacgtgcgctggtcaaaatagaacgatacaaattgcttatgccgcagaatattggttttacgggtgaatcgttctacatactttcgtgtttgaagctatacggtggacctttgggttttttacgacgatatatacgaccgcgagagcctttctaatatatgtatctagaactgtgtgaaaatacagttcatttgttggaatttcccgaaagacaagcttgccttgggaataaccgatttggccaattacattgatcactaggcaaaatagacatctcatactccgtgctgtggactctactgcttgatttctactatcatgtgcacgcaccaaatgttgtccaaagagaaatggttctcttaatgtcttaatgatcgtattgctaaagaataaaaaagtcctgaacgcccgcaagaaaaccaccattccacgattgagaccacaacgggccagcgccaggatgaatgcagacgcgaagaatcaagaagtacaatgtcaccaggcaacatgtaaagcccgtcgctcaaatctcgggggcggaaaagcattcatgcagaaaatgccgatgtaaacgtctctcccaccaacgcagaaccattcctatttcaaacacaccaaccagctccaacttggcagaagctgggaatttatacattgtcatcttcatagacaaagttgatgtcacggatgcgacggcggttggtggcaatgaactcttggtcaccggcgggtcgctcgttgcgagtgttagcggtaagcatgctctgaaggctcatgcaaacgctctcaacggtctgtactggggaccaaccggcggagcccaggaggtcaaggcagataatgccattgctgtagatatggggatgcattgggattgagcggggtgtaccagtggaggcagcacattggatgaattggacctccgggggttctaaaatgatcatgtgtcaaaactcggaatggtctgatcatctgaaagacgagacaaagacaagaggaatggaatagaccccgagaggaaggtacagacagaggctgctgagaagataaggcttaccaataggatacttgttactgaagacaaatttcaaccgataagtctgatccaggtatagtgggttctggtcaaggatcttgatgtccatctgccattcctccagattgtcgcacttgacgattgtaattcccggtgggacatgctcttgcatctataaggtcaaaggtcaggggaacacgtttataggatggtcaatatgcatgggcgctatggtatgctcccaaaatatgcggggagacaaaggcgataagaccaagaggaaaacggaggaaacggtaccttaatgagctcctatagttcatgaacagagtcagcaagatgtgcattccagcaccattcagattcagggtataatcaccttgctcagacgctttgtcgcgaacattgttgcgatatggtgctgaaagaaaaggtttagatgtttgagctccagtggagaaggaggggcggtgtctcgatttggtggagtagagcggatgtatgacgtcgaggacagaaaatgaagaacttcccaagtgagacgagaatgaactgaagaagcaaaggatatgatagagctaaaaagaagagatactgttaaaggatcacaagggacggtctaaaggcaggtggggagatcatctattgatccacgtgatattgacacctgactatattgggttcatagatgtctttcatacttggtagctctcattttgtcatagacatttcaagttgtatagttatacaacataagcattgagtttgacttcaggccagtttgaaacatcggaagagtgactagtctaaaatatcttaacagttcaatcacacatagttattacatagtcgggcagcaacgcaattacatatatcagaatacagtagcgcccgacatcgacttccatgtcggaagataatagtacaaactggcagggggtcaacgtctccgttttgcacctcggggttgcttctcatcatcgcagctgttccacgccacctcagagccggggggagccgagggggtcgatagcttccataaattaaagacggccttccttccttaactccttcacttttcctgccatggtgggatccttcttctttaagaactccacaaagctatccatcatatgagtcttcatagcatttagctccttccatggctgaatttgactcggcactgtcagccccgtatataccttcatcggatgttctcgcgcctgcagccagagattcgtaagtcccacagactgccgatttagcataggatagagctcgctccagactaggttacccatgatgcgcacctggcccgggtattccaagccttcatcctgggggtcttcactggcagtgccgtctgcactttcatttgtgacagtcttatcgaagtctggatcgacagccaggacaaagccttggaagtcccctttgagaagggctttgtcctttgtgatggaagcgtagaaatcgtcgttgatatatgagtttacgcccatgaaatcgatgagaaggaaaacagatggtgctattttattgttccactcttccgaggaccggatttgttggtagtgtctgtaagcagcattagtctcttgctcatttgaatcctgggatggaaagaataaggccatctaaccttcttgctgctgttaccggatttgctgtgtcaaagcctagttccttgcagtcaaaccaatgcagtttgaggtgtggtttgatctcgtcagcgccctggacgtcatcaccccatgccgacaagtgagcttccaagtctcgctgtagggttgcccactgctcatcggagaacttgtccgctgtgcgatagattgctaatccgaacccatagttgtctctttcccatggttgcaagctcaagctcgcttcctgcgcccgaaggagttgctgaatccagggctgtacaggtggctgcggcgaaggcgccagtccgcgtatcttctcacgcagctcatcctgtaatactgtactaatagaaaggcgctcgcggcgggccccgtcactctgcgtcgcacttggaccttgaacaaggaccttgaacaatcgcagcctcgttctgagcctcgatacatttagtgactcggtctaccaggagcttggaaaacccgtagtttttgtcttggtgctctaggtcaggattgtgtagcccagcgatgatctcggagggcgcagtgtaaccgttgtacccatccatggacatccaaatattgaaatctgccattgaggtaacggcaatgaggtcggtccaccgctgcgcgagaattttcatttccgaggattctgtattttcagctgggatcgcaatcaaactgtccaatgtccgttcacgtaattcggcaacgcgggcgaggacccaggaatgggcggtgctggtcatgacttcgtactgtgcgcgaatatattcttcccagagagcagtaaggttgagctcgggagaaaggccgccttgggccttgcgccgtgcattcaaggcgtcctgaatttctccgaagtcaccagatattttgttgaaggtatcgcgcatattagtccggatctgaggattatttaggtactcaaagacggcaatgacgggggtcaggtattcatgggcgatcgtgaaatggtccgggttgttgagatctttttcgcgccaacgcgatgcggacacaggcgcaaggcctccccagaggcgggttttgacaaagtgaatattctgtccaatatagcacagtccgctcaagtcctccgggcccgtgatccgcatcatcgccttctgcacagttgggagagcggccttgttgaacggcgcaggcgcccactctgaactcggggtcatgaacagtgggaattcatctgaatcgattaaagctaaatcggtcttcttcccgttcggtagaataccatacgttatgaattccataaaattcaagacggcttgcggttcaatcaacgtgtccactgattttggttagcgaagtgacagtgacgcagtaacaagtgggaccataccaactactatgtcctggctcatccaatgtttctctgtaatggtcgatcctctgtaatcggcagcattggaaatggaagcgtttgggctggccgattcaccagaatctgtatgggaatatcgcgcgatattggcctgtgttacgcggcaggcccaaggcgcgaggttccgagcattgcgacgtgtcaccaagccagcacgggcactggtgttcgcaacgcgaggtgtcgtgcgggaagataacctagcgaaaacacggcgattaacctgaggcaggcttcgggaaagtctggtcgccatgatgcgttggatggatgtgatctgcagggtgcaggtaaatggcgatctgagcagataagcttgggctccaggggtaaaatcctcttttttcagccgcaacggaaatactaggtatagaagactgaatttggtgctaaatttttatgtctagtatactaaggatctgaaagtggttttatctagaaagtaaataccaccgtcgagcggttattttggatcaggatacctacatagcattgaagatcatgtgattagggtttgaatgagcatctgtatcgccataggatttgcattcagttcctttacaaaaccatcatacattggaaattcacgtagctgagcaatttggttcgggaaaaatgctcacaatagttgtctctagtgggcagatagtgaccaaggtctccgcattgagagagtgcattcgaactaaattattaagtacagagagggaataggaaaagaaagagagatcgaggatcaagaccgtgggttttgcaatgcgctcgcttgcacacttgggaaggagcatctcgcaagggaggaactaacgaccactcagaccgtaacacgggacatcatcttaaaagccttccaaacgattctgcttgataatatcctcaatatgcaaatcacgtagacgaaactcaactcccgcagccgaacataacaacccaagttccacattgaagttcgcaaagtggtccaacaaggcaggtataggacggggtttggtgttagactcctcagttgactgcatgacatgcatccagtctcccttgacctctaaataagtcaggtttgggcagcggcctcccgagagaaggtctttgaccgcctcaactagttcaggtatatgctgtgcctctagagcatcaaggataatgctttccagcgatagaggcaaaagatcactgaatctattccttactgtctcgttccggccactccaacctcggtcccagtctactatatgacatatctgtagccgaagttgtttcagcgcgctgaatcccgcgaatgatccgatgtattcatagccgtaagtcccataattggaataattgttggtgtacgcgtcggtcaatgttaacgtttgcaaggtctcccgatgtctttgtaatggtgggtagtaattcgccgcgtacatcccctcatcttctaggaaaggcgggatatcggcatgctcaaagataaaagattcgaggctcttggctgcgccgatgaaacttgcaaagcctcttcgagaacaactggacttgaggtggatatgagtgacattggagtaccgagcattatcagacccgtagctagccgtattgaacgcttgatcttcgacatctttctcgccatcaaatatcatatccccacaaaagcttcgtaacgagggaagtcgaaggattgggagaaagtgcgatgagctgaggccaccatctgtatcagaacatacgacagtgaggtgtcttaatttagataagccagagccttctttttcggcgattctagccatccactcgagagtgtagtttgaatattcatgaacctgtacaaccagatcctccagattaggcaagagggccagaagcaggacagtccacgcgtcatgactcccttgagtctgtagttcctggtcccatgtggataggctatcgtcaggccctaggattgatttcagaactggtaggataacctcctgttcatatcgcatgacggaaggccgcagccactcatgggagacacggagagtgcgcacttcttgcgctaatgtcggattaaatgcgagtgtgtgcgccagatgactcaagcggccatagtggtgctctatcaggtcgagcgatgtaaagactttgggtaacaaaagtggatagaaggcacggcaacaggaggcgagccgtaaaatatccgtgtggctatcaagatggcttgttattaagagcagcagctctgctggtaacgtagagagcatgtttctttacagcatagtaacggaaaatcgtgaatgcgagtgtatggtcaaattgtatggcaataaaaaataaacaacccgaaaatgacaatttgatgggacacaattaataagcaaatgcataggctaggcaacggtcacatgagcggtctgtaaaaagacatgtaaacaaatggtaacaatttggtttcgacataactagtgaacatgatagcgagtgaaaatctttgataacccaatttagagcaccttgagggttcagtacaagtgccttgaacgttgagtcggaaaaaaagatccaagtgcttgctacccttcgtggttgtatagtttaccaaaacaagaaattcaagcgcgatgattggttgggaatcacagaattatatccaagaaaccgcctggcagataaaagatagatacagggcaggataggcatagaaacagcgtatggacaagacgtaagatgtgaaagagacacaaagaaagatagtaaacaatttacgcagcagcagccttctcgcgagcttcgcgttcgatcttctcccgctcctcggcctccttctgctcccggaccttggccagaacaacttcacggaaaatagcaccacgggcagcacttcccagactcttcttcttggcgtggccgggggcaggagcggcatcgccgcttggcactgatggttccaccacacttgactcttcgactgagttgcccatgtccatggggctggggatgtcctccccatccccatcttcgtcctcgtgcatcttgagcgactcgatacggttggcgagcttgacgatctcgattccgcggcggagacgggcgcgcgcaatgtaggtgcggatttctggcagcaagtcgcggtcgctcgcagtctctccggtcagccatacgtgcttgagggcttcctcggaggtgacccgcttgctggggtccacattcaggagagagagaatgaaatctttggcgtcctgggagacatcgcgccagtaccgctcgtggaagatgatgcggcctgtccggcattcttcgatgaggtcggtcaaggtctcggatcggaagggggagtagccacacaggagggtgtaggtgatgacgccgagcgaccacatatcgacagccttgccgtggccctgcttgagcatgacttcgggagcagcatatccaaaggagccggccatgctggtcaatacctcagaggggctgtgcagcatcttcgcgataccgaaatctgccaagaccaattgagagtcgggggcacgggtgaggtagaggaggttctcgggtttcaagtcttcgcaaggattagtatatacaaagcgctaacgtgggttagggactgacctcggtgaacaatgttgcgcttgtgtagatagtccacggcatcaagcacctggcggatggtctgcgacgcatccttctcagtgaacttgccatactcgcagattcggtcgaacagctcgccaccagtggctagctgtgtaacgatatagaatttgtcctaggcccactattagagctccgcaacgatcggatttaacagagacgcgctcaccttagattcgaaccagtcgacgaaagagacaatgtggggatgtttgagcgactgcaacatctcgagctcatcgtggaccatgccctcgttgccacggacatttttcttcagaatgatcttgaccgcaaccttctgtccgtcggggccatctgcctcgcgaacaattccgtatgtacctgcgcccattgtccgtccgaatttatagagagccctatagccagcggaaaacaggtcagcgattgtggggtaatgggggtatgataaggagcctgtacttcttttcgtagctctccggctgcccggacagcttattgagcatgtttgcgactaggagagcgagcgttagtgaactgtggggcgtctcagacgaattgcacaaaataaatgacagaaaagacccctggaggagccgaccgagcggggagggcttagacatggcgaagcagaccctgatacaaaatgatagctagaagcccaagtcctcccagttcccatatattccacggggggctcacaagaagcgtgtagatcgccatggtatccaacgcagtgcagtcagattatagacaaggctgcagcgggagaatatttggccaaccccagacgacgaatcatagcaagaacggggaacagaagtcccacgaatatgggaatatcgactcacaactcatgatgtggggatagggctgcagacgcctaatgtagcagacgcggtgtgcagttggctcgaatggacacggaacgcgttaggtagcaacgactggaacgaagaagaggtctgaggatccaataattgaggctttttaaggaatggcccgatctaagagagaatagggtcagtgatatagaaaatatagaaataaattcgaggggtgagcgcgggggtggctgcgtgaaacaccaaacaggaacagagtaaacataccacactaggcagactgaaagatccgagatcgtagattcaattgccagtgagcccaaggagatgaatttaaaaaaagattccaaacaaaaaaagtgctggagaggggaagatcaggaagttctagacgcgataaggcttgcgggcttgggggctgtagggtttagcgccagcacagccacaacggggaatgttactgcctccagggctgacgagacgaattaatatcgacatgatgggaaattaggaaatactgagtaggggaaagattgaagacgatcaagatgatcatggaaacgaaagtacgatgtacattcttggagatgtcactatttacgtactccgtactatcgcgagaacccatggtcatatcaatcccctaaatagaatgcaagacccgggtatctatttagagtcacaccattcgaaacaccatccgagacagacaagaatgtcactgtaattgaaacaccatggatgattccctgattggcaataaatatcctgaccccaccgtatctgtgtggcacggcgtcgtcaccggacgtcataccctagccagaggtatataaccaccatatatttttggcgtgttcagctgagcttgagatttttgagatttaccatcataatatcctcaaaaaccagaatatatatatccaaactttcaatcatgctatccttcctcttcttcctcgcctttcatgtaattctacttactgcttgggtctctggttacctagacccataccagaaacagcttcaagagcttttgctggactatatgggcgagagcaaggtctcttacggactgaaaagtatgtcatgccaatgagagaaagaggcaaatgaattatgaattcatactaatctgagtttacttacaggaagtctcactggcaagaaactcaccgaggaccagaatctaagcaagattcaagatcaactcggcaatcaactgggtgacatgtttggaaaaggaggtctgggagagggattgggttctgtgttgagtaagggtctttgaattggccattggagttgaggaagtctggaagaattgttgcgcagtcgcccaattggtttgatgcaaaagattacgatatgaatggtgttttctctgttacagattggacaaaggtcgctgaaaacatatccatgaatttgttacttaatcttcaacatgattttagttccaacaatcaaatgtcttgctattcctgcccttgtcccaccgaaccacaacctagataatcaaacatagacgatgatgacactcatgatctgaattgatatccgcctagacggattcaacaacgcaacacctatcgagcaccctgaatcaaatagccccagggccaagaactgaacctgcatccacacctgcacgacacccaacctccgaaaaatcaaagagcaaacaatcaaagaacaccaacaaaagaataagcagcaaagtctcaccgctgcaaccagtcccgggatccataacctgtctcaccaagctccgccaaagcatcctcacaaaggttatcgtagtactcagtccccttccagtgactgtgcttcgactgaataccaatcctccaatcctcctccctgagccgcttgatgcgctgcgccttagtctcaacccgaataatgtttccatactcatcgagattaggcccctcaatcacaggaggttcctggggtccgccggaagtgctaggcttcacgggagaaaacgtccagaaggatgcagagcgagccatagtcgtgttgcgagagcgacgcgcatgctgcatgtccgaaacatgtttgatctccttgcggagcccggtaatgtcggcgggaatgtgctcgcggagccacttgacagcgctgttgaagttattgatctgcgcggcgcgttcggcgctgacaggcgctggagagggctttctcgactgcaacgagggcgagctgacgctttcctgccctggtgaggctgggcggctgacgaatggggaggcgagggggggcatcttctttcgcggaacgggggttggtgtcgatggagtcatggtcatgggcgaagggaagaacggagtcggacgctttggccgcggtgctcggattgaataactcttcttctctgtgttagcattcagatttccggctgggactattcccagggcagccggggagggcgagctcggccgggtcgaatcacctctttcatagacgtttgtggctctttgcctccatggattactattgcagagttcctacacatgtgcacttcgccggagctcttccgaattgcaagcggggatggaatgagctcgcgacgcttcactggatcgtcaaactcgactgggaacttgattggagacagacgcaatggtggccgctttggatcggcaaagtttggcggcgcacgagtcagaaaagggtcgtcggctgctgcaatcatggagttatcaatcatccgggcaatgtttcggacgatagatgccccgttgggaagtctatctctggcactgttaaaagagagcaattgatctctcgtagctgggcgagcaggagcctcgcatggtggtggaggaggaggccgggtcggaggagggatatgaaaagccgggggaggggcgtcatggtcaaaacgcaagacttctcgagcaggagcaggaggtggagtgatacaaaagtcagtggtcatagatgagcttgaggcgcgagagggagaaggggcaggtacaggcgcaggaggagtttgaaccatcctagcattaaaagcggacagatttcgaactgacagagcttcagcatttggaccaggaccaataacaggagtgacgccatggtccggtgaatgcgcaggactccactcgatagcactcgaggaagaccgggcagacaaggtgggagaatgaagaaaagtaactggcgagtaggtctggttgggattcaaaactggggctgggatagtagctggcaaagactcataggcagtctgaaaccgctccatagcattagtcaaaagcggtatcttgatagccgaaaatatgtgagcagttcgtcccatgtactcgtatgaggtggctgcataatagtggaggtaggtcgcactgatcggatggagctttatacaagcccattagttatcagaagagatgagatgaatgaggcacaaactggactagatgcagtctctatgagctggttgcaacgcatggcacattgtttgtattgctggttgaaacatagccatttcacatcggcgagggctttcttccattcgtaggcatctcgtggaggagaaaagacaccaaaaggcagcgaggtctccggtggcatttctggagtggaagccattttggaaacaaaaggaacaagtgaatgaaggatgaagaaaagataaaacacgagatgggatggaggaagaggacgaagagagggacacgagacgggatggaggaagaagagagggacgcgagatggggtgagaacgtagaagaaacaaagactggagtctcccaactcagagtttcccagacaagtccatttctcatatttgcccacgatatctatgccttcagtcatgtttaccagatttggccagctcccaggacactcaagcctaggcatagctccaagtgtacatcatttaccagtagccaggaatactgttcatattatcatccttaagagacctacacagtgtacataggaattgtagataacctggatgatttccgactaaagatatttactagaaataatatggtcatctagacctgctcaacaacctgaacaccattcgtctcatgcttgatctccacccgtgacaatgcctcgccagtagccgaaagcgactccaggaaatcacccagcaaacggtcaagttctgccgtcaccacaccatcagccataccctccatcagactcgccgcacttgggggattgagagccgggaaggggattggtcccttgtcttctggctgtgacatgaggacttcaggcgtgtcgtgtcgtgcatttcgtacggtttcgaacacgggagatcccggttctgagactgggcccgaagtcaccgaggtgggcgttgggggaattggaacggccgtgggtaaagctgtcatactaatttcgtatgaggaaaccctggagtgcatgttccatgcagggtgagattctttgtctggcccggggccatcttcgtcgggaccggggccatcttcgaccccggaagcctcatcttcactataaccggctaaatccatcatcgcggggagttcggtgtcaaagaattgactgcgacgaagcgagtttgcgtcctgtggggtggtgggacgatcgaagcggaagggatcgtaatctgaatcagaggtatacgatgccgcggtcgaaggacgtgagtcacctggttcacctggttcatctgttgactgtggctgcgactgcggcggaggttgaacctcaggcagcggagcccggagggtgtcatgtcgatcgtcgtagctttggctctcgggcacagatcccatgactgggaatgtccactgcatggtagctcgcttttcagcctggaaagactcctctgttgcgggctcatgtggaggaacttcctcttcctcttctttcggcttttcctcttcgtcttgaacgaatgacgggaatttccagtccatggtgggaggtcgaggaccagacggcacaaatgtatcttctaaggcttgatcatcatccgcgccgctatcagacgactttgagctattctcagaggagctcctgttcaatcggagactggagcgggtcgcgcggatagtgttcgcatcgaccaattggaaaggttgcgcagatggagctcctgctgcgtagtgtgaggcctcgaatgacccgatgtcgatatcgagaaaagttgatgtgacagaagagcgatctgtttccgcacggaggggaagatctgaagtgggctcgggttcgatggggacaaagtcattttttgtttcgtatttgtagctgggcttctcctcatcaaacaggcattccagtgccgctgcgcctcggcgcacacgttcatcgaaattggccttatcttcataattaagatcgtccccggaaaactgttcgtacatgtccagctcaggagaagcatcggtaggactgatggattgctccatctccgccagcgaggccgcaatttcatccaggtcaataacggagaatcttcgctcgaacccatctgttgtactgaaattccagtcatcttctgactcctcggtacctgggagttcagctgccgcggcaccgcctggatggaacaaagagattcgctggcctcctcgctgggaccattggtagtagtttctcaccaactcactcacggaggcggtcggatatgcctcctccgtatcggcaatgtacgggtgagcaagaatatctgccatggtgggacgagtatacggattggagtcaagggcgtaggcaataaggtccttcaggccttggctgtatgtatcgctgtccagtgatggcgtcttgcgatttagttggcgaccgatttgcattcgttcccgcaggcctgcgtttggcggattcccgttggcgaactcgaacagtgtgcacccatacgcccacacatcaatctcatgcccgtattgatgggcctctccatgagttgcaaacatctctggtggcatccagtgtggtgttccaatccaggtggatcgtttgtctcgctgtgattggagaacaccagcaacaccaaagtcacagatctccagacgaccctcttcatgaataaggatatttgcagctttcacatcgcgatgaatgattccagcttcatggatggcatgaagtccaacagccagctcacgagcgattggaatgatgtatttctcatcgagcttgtcgtttgttgcacgcatcagggtacggacactgccaccgggacagtactcgcagactagccacaactgagagtgaattgagatggcttcaatgatttcgttgatgtttttggcaccggaatccttcacttgcttcatcacctttgtttcatggatgaaatcctttatcgactcatctctgaaatctcgaagtgacttgtagtctagcgagtcaatatctaggactttgatagcaactagctggcctgatgatgtttggtgacccttataaacacgaccataggcacctttgcctatcaactcttcaaactcgtatggtgggacctcggttttcgcacgacgacacatctctcggacggccactccttgttcacgagctagcttgattgcctccaccttgtgcttggtgatggccgccattgcagaggatgggtctaggagatgagaagctcgatccattgtgagtgaagataagcttggaatgaactaggtgtgagataagataactgtaaaaatgagataggtataaaagtgagtaaacagtaaagatagagatgggggtggagtgagatgagttaaaagggattttaaagatatgcgactcggtgcggagttaatgattgaatgcggatggagtgcgtttgggggtgtgacaaagcagatgtttgagctttttaacaaaacgtttcaagattctcttgcgcttcggtgtgctcctatttctagaggcaagagagattatcgacggacgagtggagagacgaagaggtgtcttttggtaataccgaggggaatccgtaggtgtagagcaaccttcgaatatactgtgaaaagagtgctgttttctgatcacgtagctgatcggacggacccgagaggagtatgaggggaaaatggtgtatttttcctgatttgcgcgctcctgagcctggtcggaggtttcgagatccacttgttgtccctcgtgatagtcggggagaggcaactctccgcaagagctgggggacggtgaagggatctgagaggaaatcttccgagtgttgacgacggctgaagtgtcgttagaacacggccgggagattccagaagaactagttggtagcccactgttatcgagtgcagatgtatccgctttggcacagactctggaaggctcttgttctccgatcgggttgctgtccaccaaatcttcagagaatcgggaaatccgaggtaggctggtcgcggatttgatatgactgctggtgagtgtcgacgtattagcctgggcactgtctttgggtgacaatcgttgggtggcagaatagacgtgggagaaatcttggtccacaacggtttgatcgcgaccgggaggtcttgggaatgattcaagtagcttcttaaagctcccggtgtgatttaaagtccttgggtcctgggatgcttcgcaattcccttgggtttcaggggtttcgttgaggttatcaacagaatcgggcggctcacctttttcgctgtcatagactgatgagcatgggggttcaacagatccagggcgtgtaacgttctctgatgtcttatggtgttcgggaagctccggggactcgagacagggaggctcgtcgtccgttgcaagctgttggaataactcggatagtagagattccgaatcggcaccgatgagggaagtccactcttcttcgtagtgaaccaggtctctgccttctgaatcctcgggaaagtcactaggacgatgctggaaggattgtagacgaaaatgattcgcacgttcactggggacagtatgttagtcaacgagattcacccactagaaggaggagtatcttgccagagcctagtagatgcaagtctacgagcaagactagtagagctgagttggcgagattgatcttggctgtgactggcctctaggtccggaggaagcccagcaaatgggtcggatgagccgaagagacgaagcaagaattggtgctcacttggaggaaatccgagctcctcgatcaaatcgtggagactaggagactcgtcagccattctgttttgataattacatcgacggtatatcaatcaagctcagaggtcaattcaatgatgggagaagggtagaggggatgaaagcgattatctcgcgccatcaatgattcaggaacctacctggtcctggtcgcttatttaatcgaaatacaagccaccacctgggaaacccgaaaatcgagtagacaagccgagtctcaccatttgtctttccaatatggaatgctttgtagggacaaatggaccttaacaatgaactaaggcagatatggtatttcagatcccacagccaggttcatacacggcttcccactggtgtagtgtaagtcttgagatgtgtggatatcctgaagaagaagaagatgaagaccaactgccagatgttgttggcgatactgtggcacgtgatatatacatccttatcgtgatcttaaggagctgaccgctttgtgttattttaaagggagattgaagttttggctttaaactagctcactaggcctagattttgaggttcttccaatttcacagatgatatcagcaaggtctagtgtagaaccttagaacgcattatatttcattagatatattactcttggcactattcgatgattcccagccttaatggggatcagcatagattgcttatcgtgaaagcttatcgtaatttctctctttcagttgctgtccatggctgcgaatggttataaatgacccggtgagatgacacaagatatgattcaatagaaacactacagctagtgtgccctattgggggccagtcatatcatctatgataaaggctgggaaatttggagcatgataggcccaacaaatgggatctggtagggcgacatatatagttgtgtttgatagagccatcaaatcaatgcgcttaggtggttttaaacttcatcacaaactcattggtttgctgcatcccgacccatgctagaatattcattgggacttagcatcaatcctggtctttatatattccacggttgtgcttctaataacaagagtatcggtcacagccagggatgattcaatcgactttctaacggtaatgcagaccattcatgatagtagatagtctggagccgctacagcgtttatcgcctcgaaatataacacaaacatggtgacattgagcggacctaagattcattgccgaccgtccggaatgccacatcgatgctctagttatggcgtggtgtcttagtgagatgttagtgcaaaataattctttgagaagagatcgttcattataagaaccgtattctccctctttgggtagatcttagtaacagtgccattggacacagtacgaacggaataggcgttcttttttttttcagagacaaagcatatattgtatgcaaagaggcgcctagtatagagctaagaaccacgccccactacgtatgtcgatcagcagttaagcgtgggaatattttctaacttattcttgtactacggatcaccgggattttaattctagaagggtaaaattttatctaactaaattgacacaaaaccgatctgacttggtcacaataggactcgcttatcgaagggactctgagcgatcgggtggcccgctgggtcttcgagtgtcggggtctgtttaggggcatgtcggggtctatttagaggttagcttagagccttagacgcttataacgaagagacattacatggttatacaactctatgttatcaaattacggtcttttatttccaatatgagaagtctaaaccaaggcaacctagcacttgggcctgagctaacttttgatggtcttttccgtagcataataggtagcctttgcaagacaagcatagtgaggagccaagaggccaaaagaggccaggttacactctgcactacttcagagtattgataccagttattagataggtggactgactcaccagattattgcgttggctattccttacaacatatatattgaggtggctgccgggactcggcgccggaatactcgggttggaagacttgtcctggcttatagactgttttgacatccactattttgggtatagagtcaagtttttgacagacttgagcattggttttattagttttacctcctctatacatgtattgcactcccatttcttgtaatgtatgcaggtgggatgatttgatgcctggatgccttggtgacttagctgtccccactagttaatgcacggtggtgctgcacgagctagtggaaacaggtgaaaatttgcttaaagaagatgtaggagtgggattttcatttcaatgcgattgaatgttttaagtatctctattttggattatatccaaatatacatatgtatactagtacatagttgtatagctgtaccgtacaagatacattccaaggttgaccgatagttagaatattaataatgtgcattgccccaccttgatagaggggttttgggcaggaagtcaagtcattcttagaaaccctggaaacataaaagcgtgctgtgaatcataggctttgagatgactctttttaagcatttagtacgatcaaggatcatagctagagatataaaacgagtcggatgacatctctcgcttggggtatggctgtcaaaacgtcaccggagcacccacggatggcaaaaacagacaatatagtgagtcaggacatgccaatctgaaggatttgaaatcaagaaaaaagacccaaagtaattgaaaggaatataagcaattaaaaaacgagaaacggaaaaaaaccgaataatataaacggtttcataggcaaacaggccagtcagctcaaaacgcacaaaaccgggaggagaaaaaaaagtccccactttcgcttttctttttttcctctcccacttttccttcccctcttcttcctcttcttttcccctctatctctgtccaccaggagcagctgcacatagaagtttttgattcagcgatcgagaagtctcgatcctagtcatctgtgtgctcttcttcttttcttgtttatccaagttaaactaaggatcaaccgccaaaatggttaagtaagttgaccttgcttgagacctcgatgtcctagaacgtactaacaatgatgtgaacagcttcactatcgaagaggttagtatttgcctttcaagggttccaaggttatatcaaacactatcaccagaagaggagacatattccctcgatggctccttcaaatgcctccatctacctcccaccgctggtgatacttgaaaaacctttcaaccatttcccttgaaacacaacatcatcaaatcatcatgaatgtcgatactgacctagatcagatccggtctctgatggaccgtcgggctaacatccgaaacatgtccgtcattgctcacggtaagttcagacggcagaggaagcgatatggtgaaatggttgattctgactcggtctctgtgcgttagtcgatcacggaaagtccaccctctccgactccctggttcagcgtgccggtattatttccgccgccaaggctggagaggcccgcttcatggacacccgtcccgatgagcaggatcgttgcattaccatcaagtccaccgctatctccttgtacgccaagttccccgacccagaggatcttaaggagattccccagactgtcgatggatccgagttcctgatcaacttgatcgattcccccggtcacgttgatttctcgtccgaggtcactgctgctctccgtgtcactgacggtgcccttgtcgttgtcgactgtgtctccggtgtctgtgtccagaccgagactgtcctgcgtcaggccctgaccgagcgcatcaagcccgttctgtgcatcaacaaggttgaccgtgctcttctcgagctccaggtctccaaggaggatctgtaccagtccttctcccgtaccattgagtccgttaacgtcatcatctccacctacttcgacaaggctctcggtgacgtccaggtctaccccgaccagggcacaatcgctttcggttccggtctccacggctggtgcttcactgtccgccagttcgccgtccgttacgccaagaagttcggtgttgaccgcaagaagatgcttgagcgtctctggggcgacaactacttcaaccccaagaccaagaagtggaccaccaagagtgagtacgagggcaagacccttgagcgtgccttcaaccagttcatcttggaccccatcttcaagatcttcgccgctgtcaaccacaacaagcgtgatgagatcttcactctcctcgagaagctcgaggtcaccctcaccaacgatgagaaggagctcgagggcaaggccctcctcaagcttatcatgcgcaagttcttgcctgccgctgatgcccttctggagatgatctgtatccaccttccttcccccatcactgcccagaagtaccgtgtcgagactctctacgagggccccatggatgaccgcgccgccatcggtatccgcgactgtgaccccactgctcctctcatgctgtacgtctccaagatggtgcccaccaccgataagggtcgtttctacgccttcggtcgtgtttacgccggtaccgtcaagtccggtgtcaaggtccgcatccaaggtcctaactacgtccccggccgcaaggaggatctcttcatcaaggccatccagcgtaccattctcatgatgggtcgcttcgttgagcccattgaggatgtccccgccggtaacattgtcggtctggtcggtgtcgatcagttcctgctcaagtccggtaccctcaccaccgatgagactgcccacaacatgaaggtcatgaagttctccgtctcccccgttgtgcagcgctccgtcgaggtcaagaacgcccaggatctgcccaagcttgtcgagggtcttaagcgtctctccaagtccgacccctgtgtcctgaccatgatcaacgagtctggccagcacattgttgccggtgctggtgagctccacctcgagatttgtcttaaggatctcgaggaggaccacgctggtgttcccctccgtatctccgaccccgtcgttgcttaccgtgagaccgtcgctggcgtttccagcatgactgccctgtctaagtcgcccaacaagcacaaccgtctgtacatgactgctcagcctattgacgaggaagtttcccaagccattgaggctggccgtatcagcccccgtgacgacttcaaggctcgtgcccgtgtccttgctgacgagcacggctgggatgtcaccgatgcccgtaagatttggtgcttcggtcccgacaccaccggtgccaacttgctcgttgaccagaccaaggccgtgcagtacctcaacgaaatcaaggattccgttgtctccggtttccagtgggctacccgcgagggtcccgttgctgaggagcccatgcgttccgtccgcttcaacatccttgatgttaccctgcacgctgatgccattcaccgtggtggtggtcagatcatccccactgctcgtcgtgctctgtacgccgctgccatgttggccgaccccggtctcctcgagcccatcttcaacgtcgagatccaggttcccgagcaggctatgggtggtatctacggtgtcctcacccgccgccgtggtcacgtctacactgaggagcagcgtcccggtacccctctgttcatggtcaaggcttacttgcccgtcaacgagtccttcggtttccctgccgatctgcgttccgctaccggtggccaggctttcccccagtccatcttcgatcactggagcatcctccccggcggttctcctctcgaccccaccaccaagcccggtcaggtcgtccaggaaatgcgcaagcgcaagggtctcaaggaggtcgttcccggttacgaaaacgtaagtctttatcctcactctcgttggtcacagttactaatctggtcttatagtactacgacaagctgtaaaaatgttcacggtcacccagaatttcccttctgccagtcattcgtggaatctttcatgagattgatgaattcaatacaatttcttcggttcaacaaaattttattccctcattcgtcggtatttgcttcgatcgttccgcctttagaaatcaggacatgaatattgaagcctctaggtatcattgattctgtcctttcattgccgtttctacatttggtttttctgccgagggttttttgctttttgcgtttttgctgtagtctagcagccagtttcgatatgaaaataaacttgggtatgctaggcacagtggttcatctgtagacaagtaattgtaagcataaaaaaaatcagcgaaaccatgactccgatcgcaatggtagcttgaggagttgtgttgtcctatgtcattcaatcacgtgatccaccgagcctcgcgtttttccttcacaatcgcgctcctagccatatccttctattccctcacggttggggtgaatgcttatcagcttaaaataacctattctcaagcattgttatctgaaatacaagggtgtgattttatcgcatatacaattatcactgcacacgcaggcatcttcccgcgtgacggctttgtttaaaccgcatccctgcaatcatcgccactttcacttcgatcttttgttcgatccaattcaatcctcacggtttgaaattgctcggaaataatcttcgtcatgcagtttactgatgcagaagccgctgacgtaaagaaatgggtggtaaaaaaactggaggacatgtgagttgatcaggcaccagaatcggggactgagacccgtggattgccctaggggaagcaaactgagactaattggctttattctgtctttagctcggatgccgactccgacgtgctcgcagactatgttttggcgctagttaggtccgatgcgccagccgaggaaatcaagaagatctcggtggaaaacttggaggatttcctgcgcgaacgtgagtccatatctcaatcccgaattgtttcatacaactaacaactcttagacactcaaccgttcgttaccgagctctttacaacattcggtcccaaacaacccgcacctcctacgcccgcgcctgcaccccagcctcagcgccagccccaacctgctgcccagattcctttgtcacagcctcctgagaatgcccccagcggcccgagagctaccgtcaccccgggcagtgccaaccggaaacgaactttcaatgagggattccagggggagccggatcacgacgatagtgggttccagaatcgcgctatcaagactgcacggcgtggtgggcgcggaggtagtcgcggcgacttcatgggcggacaacatatgcaagcgggtcaacaatatcctccacaacaagcgggtcaactgtttcctctgcagcaacaaggccagcaattcccctctcagcaacaaggccagcaattccccccgcatcagcagggccaacagttccctccgcagcagcccggtggcttccctatgatgccaggtttcccaccgttcgaccccaatgaccctatggcagcaatgatggctatgcagagtatgcaaggtatgggattcccgccgatgccggggatgcctatgcccgggatgcccggtcctcccggtcagccaggagccgatcagatcccgaaaagcaaccagcgatgtccattctatgatacccaaggtatctgttacctaggaaacacttgcccttaccagcacggcgagggagtctcgaaagacgatggtaagaacaattcatttatcctagatataccattgctaacaatcgcagaatatgaccccaagaccgcgggtacgcatgcgcagcggggcggtgctccttcgcgcggtgaccgtggccgcggccgtggtcgcggcgggttcagcggacgaggacgcggccggtccgatttctcatcggcaggacctaatgaagatcagtctgttacgactattgttgttgagcagattcccgacgacaagttcaacgaggattctgtgcgcgagttcttctccgagttcggtaagatcaccgaggtttctttgcaaccctacaaaaaggtggctttggtcaaatacgagactttcccggaagccaaggctgcgtggtctagtcccaaggttatcttcgacaaccgcttcgtgaaggtttactggtacaaaccgaatcgcgatgagacgcacgacagtgcacaaccggaggccccagccttcaacaaagaagagttcgagaagcaacaacaagaagcacagagggcgcacgaggagaaaatgaaaaagcgacaggagaccgaagcagccaagcaggctctagaacgccagcgcgatgaacttatcaagaaacagcaggaggagcgggcccgtctcatgcagcgacttggaggcacgacagacacaaacggtgccaccggtggtggagacgctatggccaccgagcctccagctgacgagaatatcagtgctgagacgaaacagctgcgagctcaactggctgctctcgaggcggaggcaaagagtcttggtctcgaccctgcggcggacccttcagcgcggggtggctaccggggtcgtggtggcttccgcggccgaggcacgtaccgtggacgcggcgcttacgatcccaacttccgcggaggatatcgtggacgcggtggatttgcggctcggggacggggaggtgtactgcgtctggataaccggcctcgacgagtcgccgtatcgggcgttgagctcaactcagacaaggacgaggcattgcgtcagcacctgatggtaagttatgtatctttctaaccaagcaaagcgtgtactaatttgttgtgttctagggcgttggcgaatacgaatccatcgaggcacacccagaccagccaaactcggtcgtggtggcattcaaagagcgcttccaggccgagaagctaatgttctccccgtggaacatcccctccgtgggcgaggttcaactcacctgggtgcccaatccgcccgttgtacttcctaccgctgggtcatccacggaattcaagggtggtattggacaggacgaaccggaagacacagtcatgtcgtcttcgtcggtggccaacagcgctcctgcgcgggatatggattacgacgttgcggaggatgacagctggggcgcttaattccgttacttttcgtgtaccagcatcatatgttggttgtataggctgcattaagctatttttacgggatggacgttccattccgacctgttgattaaacaaaaccgtgccaaaatcgtagatcacacattttgaggaatcaactcaaccgtatacccatcctatccgcatcagcacaataccttaactcagggggccatagaaactcaccggatcagcaaccatagcaaacttctcaaaaaaccacgcataattcgcatgaatctcgccgcgcgcaatacccctctcctcctcccactccgaaagcggcaccgcctccctcgaagaaacacccacatccttcagaatcctaaccccaccatcccgcaacctccgcacagcagccgacacatcaggaaccgtgaaccccaaatgcgcgaatccaagatgcgggggtacattccccgtagaaatagcaccagcacgatccgcaccaccatcaactttctccgtaccatgcatatggaacaactccagcagcccgcacgtcttcgtcaaaacggggatttcgctcgtagtcttcgcccacgcggtaatgtcgtcttcggtcgtggctgatggcggcgggtgtccgaggtagtagattgtgaaggggccggcgttcatggtgaagattatgcgcatgcctaggaggttgatgtagaagtttagggagcgggttgggtcttggatgcgtagggctaggtggtttagtttgtagtcttttgttgcgggtgttggggctgggtttaggcttggggctgcgttgaagaggcctggctcttcttcttggggttggaggtggaggtttgttgaggacatggtggatggatgtatgaatgagtttggtggaattgaatcaaggtgcgcggggtatataaaagatatggattttatagaatgaggggctgtagtctgctagtaactagggcggatccattgggcctatcaaagagaaagaactggatatcttggaatagttcatagcgtgcatcccgagttgatctacgatagcgtgccgcatggataacttcaagagactacatctattgataaacaatcatatcaagacccccctcatacggcatcgtcacccgtcggaatccactgccctcggcatcaacatacgcaaagagctcctgatacctatccttcgccttgacagtattatcaacgatgatcacggcgccaggccggaaatgcggctgaacaagcttcagcgcagggagggcgagaggcgtccagactaggtatgtagtggttagcatatatgcccgctgctactatcacgactagacatatccgtataggtgcgtgtgtgtatgttactgcatcagcccaaggaaatcaacaccacttactatccaacagcaagaaatccacagtccccaaatcggaggtaagagtctcacgcagatccccaacacggagatcaatcacatcctcaatctccttgccagctttcgcccaatgctcacgagctatcttagccttagaatcttctttctccgtggcgatgactcgcggcttagtggtggcgctgacgcgcttcgcattctctgcgacggcaagcgctaggtagatggtgctaacgccgaagctggtgccggcctcgacggcagtctttgcgttgatgctgcgcaggatgtggtagactagttcgcacttgtcctggtccagtgcgatgaacttgtcgaccatgatggagtcgaattcgggactgcattgttgcggtaggttgtgccagtccacggttgattcttgggttagggatttggtgtgtaggtctttgaggtgggtcaggacttctggggaggctgtgacgggcgagggtgccattttgtattgtattggttatttgagattaggaagttgttatgttgaagtacgttttggaatgcttggggaaggtgattgaagaaactaaggactaaagacctagcaaacggaagtggggaagggtggtggcacgtcaaaaagccctcaaactccgagatccaagggaatcaccggccccgtgttaattccggtgtacgccctatggcggggaatttgtggggacaagaaggagaaagtgccgagatgctaaccgacatgactatgatcagtacgcctttgtccgatgctataatgatcattaccgttcaattggccctaaccgccgagagtgcaagcacagcaactgaaactccatactactgctctagcaagtccgcatagctattcaaagacttcccaatcaaagaaaccatctcccagatataatccgccgtaaacagccgcgcccacaacctggtgaccgcagcactgagccgtgtattagtagcgagcagccactccctcgaaacaccatgctccacctccataaccatctcgagcacgaaatctcgcaaccgggtctcctgctccgtaagccccgggtccggatccggcaccgtgatcgcctccagccacttagccaatagcaccgcgcactccagggagcacaaagcgtgctgattcgaccacagagccacctgcgagtgcgcgacaaatccaataccgagcttgacaggtgtgctgagggcatgtgcgcagtggagtgcagcgcgtgtgagacggtcgccgcgtcggacggcgaggttgtcgtggagactggttgcgatctgcacgggatcccaggtttgcagttggcgggctgagccgcagtctgcgttgagtcggatgtaggctagtcgaagcagcgctgctgatgtgaaggatagcgggccgttcgggctgagtgggtcaacggaggattcttggttgcgctcccagcactggcaccagcgttctagtgcctgttcgacgtgtacgagctcgggtgtgggtgccattgacgatggagtgaagcggttccgtcgtgacacgggcagtcggcccgctttcgtcatgagccagatgtcttgcaggattgcgtggattagcacgtagccgccgagagaagaaaatcgctctacattgctggttggtttaaacaaggcggaaagggcatcctggaactttggctcgccaggactcttcatgcgctctatctgccagagatctgagcgcggggcttgccattctttttcggtgctgggtagttcgagtgtgaaatcttcagtgagaatcatgggtgggacgtcgaacacgatagtgtggatattgaagaaacagaacacaattagtttcgtgcgcttcacgcattcccgtcgtatccagctactccatgttccgtcctgctccggtagccggttgagtcctccttgtcggacgactatttccattagactgcgaagcgacagcgcctcgtggtatggggggttgttgataaaccataacgacaccgaggtcatatacaataaagcttgcacagtttgcagggtaccaatgtcgtcggccgcgttgaggccgggcgggggcagcttgcccgactggaagacccggcgaacatgttccatagtcactggtttggcaatctgatagagacgaaatgcagtgtctggctcacggcaataccgtgcacccaatgccgccatcgctaggaaatacggtaaggtcatggaatctacatcgaaggtcgggatatgcacgattgggtagtgctcgtgaaaaccggttacatacccggtcaaacatcgggacagcgcatgtcgagatggcatcgatggatctgggaccacattggcgtagtcggctaacatattcatgaacttctcccggcattccgccgtgactggtacgaatcccgtgggctggcgcgccgcgggggagatgtgatgatatccctccggctggagggagggcagctgagtgtcatttcggggaagtacagagctggaaggagtggaaggagtattttcggtcagcgcccctcgatcagaagattgatcatattccggcaccggggagaagtgcaacggtgggaatagcgggagtggctggtaagccggagagaacggatgatttggcaaggggacgctatccaaaaacgaggtgaagtcatgagcttgatatgatgccggcccaaagccacttagagcatagccaaaatccgggccaggggatggggtggtgggtctttcagaaggagtgtctatgctggccaactgagtacccagcaccgggcggtgtacggctggcgacaatgatgtgaaatggtcgacaggcccttgtagagcgctaggattagattgtgcgtggttgactacagatgccaaggagtttaatccgtccaagggagaaggatttgcgggggagggcgtgtgtgtgttattgctggctggactggcatcagggttgtgagagagacgctcatgacgagccagcagatccctagaatggtgagtacatggaactaatagatgtactgaaattatatatcgtacttgcgtgtaaaggccttgggacattgaacgcaaacaaacggtttctctttggtatctggggggatattagacggagtattcggtccgaggtccagaagacatacgtgagcgatcgtgtctttgaagatgctctagccgggcaaatgccctcgggcatcgctgacactgatagggtttgctattcaacattgggggtgaacatgacgtggagggttggatggtctcggggatttggtgcacaactccggtgagtctgacagggacattattccctggtgtgcccggttcacaagtacctccacaaatactaccacggactaggtcgaatcgagcagaatatcatgaaccttgtactggtcttgcatcgccaagcacttattggcctagtctgccgattcccacgatgattaatgggctgtaccgaatcggtgcaaatcccgaggtctccgaattggagaaatttcatgcacgtgaccgccaatggttaattgcctctgcggagtataccccgtattcgcatctatgaactcgcgatgcgacgctggaaccgtcatttaatactggtttctttattttactcttctaattctgaaatcagcaagtcttattctcttcaaatcatcgagatgacgtgaaacaccgtcaaaaaaggagaaagagctaggccttgttcagtagtcgatatgcctatgactacgacgccaaggcacgggcccccacgtcttccggatggagcattatcagttccaccaacagcccaactttgtctcaatgtactccgtacatggtcggacctagtattaacctgcaaagagtcgtatacatgatcaacaggatccacattagtccacaagcaatgtggttcggatgataatatcaaattggagagatgataatatttcggggtttggtcctttctccggttttgtcttagttggactccacgccctggaagcttagcttagaaaactcttgccaacgatcattctgatttactacatggcatctacaacgcctgactcacttaaaccgcaatcaacaacagccatggcaagaaacgaggagactaccaagtctctatgcggatctcaagatatcgaattccgctatctagagctagagacacccttaccgaccccatgcattactttaccacccggccccgctcagtcaccaccaccagaagcgcccagtctagagaaattcatctctccctttctgtggccaaaatggcgcaagtccatgatgacttatatcgcttgcggggtcactgcgctagcaggttatgctgcgggcgaggtcagtcctgcatcagaggaactaactaaattatggggggtcagtaccgtcgtttacaatttgagcatcacgattttctgttgtgggtttgccctggcgccgatggcgctggctcccttttctgagattaatggacggaggccgatctttatcgccagtgggattctcttcgttggtatgtattactccgctgttttactcggcatatgctgactttctatgttaacagcctgtttaatcggctgtggaggcacgccgtcctttgctggattgcttatagctcgtttcttcctgggtgtgggtggatgtatgtatagcctgctccgaatggtcgcattcaattgatactgacttgaagcctcacagcaacattctccactatggtcggcggcgtgatcagcgatatctatcatgctcaagatcggaacacgcccatggcgctcttctcggcatctgcattgttcggtactggcctggcaccgatgatctccggcgcaatcatctcccgcaccacatggcgctgggtgttctactcgcacgcaattgtgtccgctgcttttgtcattatcatctacttcttcttcagagaaacgcgcggcagtgtcctgctaagccgcaaggccgcaacgttgaacaagtactacgagcgactcgaagaagcaggccatcacggtgtaatactgccgggcgaagaagcgtctgaagaaaaatgcgttcgtcgaatcaggtggaaagtcaagagcgacgagcaacgagaatcgatcgtaaccatgatccagatctcgctgtacagaccattccgtaagtctacgctaaccttcagtccaccatcccctaatgaatgaaagaaaaactaacatcctaatctagacatgctcttcaccgaacccgtggtcttcttcttctccctatgggtctccttcagctgggcagtcctctacctccaattcagctccataccactcgtcttccgcacaaactacaacttcacaatcgagcaaaccggcgccgtcttcacctcaatgtgtgttggcaccatcctcatcactatcatcagtatctatcaagatcgcatcgccatgcgcttcggtaaaaactccacttctcccgaggccagactgcacttcgtctgcatcgagtccgtgcttctgcccattggcctgttctggttcggttggagttctttcccatctgttcactggatcgtgcctgctttggcgattggatgtgctaccatgggcatcttttccatttacctcgctacgtttaattacctcgctgatacatatcaccggtatgcgagttcggcgattgcggcgcagtcttgttgtaagcttttccatgggtcgttgatttgtatgtgatgatattttgctaacgtcttactcactaggtcggaatttgctcggtggtatctttccactggttacgaatgccatgttcaccaaccttggttatccagaggcatcgagtctgctaggaggacttgtaagttgtggcaattaacaccaagagaagaaatcgactgactggatcgaaatagggtgctgctttgactctggttccctgggtgctgatcttctacggacccaagattcgagctaggagcaagctcgcaagtgtaggtgatgcctttcattcatacacactgtttgagactaatggaatcataggaactcgcacattaaatgatctacaacgcataccaaccccgaacaagacaaagagtaatttaatcacagcattttagggtggaggattagagccaacgacatcatacatgcatattatcaactatccaggcctacctaggtagatagaccggtctgaattctcattacaacaaataaattgtcgtatcaacgtacgcttcctataatcggagcatggctacgctcagcaattcaaaaatccccacaatgctaaaacaatgtacatgatatgatccaccatgtgttccatgcaaaatcccgaaatcttagaccaaaacaatgtaactacctcgggcgttgatgccctctaaatggatgtgcaccatttatcccagagcgatacgatgcataccgatcttcatcatcgctatcactatccatctgatccaaaaggcgatcaatatcatctccagcatgagcttccagtcccggtttcctttctagcccacgaccattgtgagattcggaactttgggagccctgacttccatcggggtgagctccgttgctggaagcgtggaccgattcgttctggctgctttgcgtgctcgttggttgcagcgggcgagggctgaaacgataacccgagttctcgggactggacatgaacatcagggtttcaattgcgtcttgttccatgagtgtgttttgggattgggtgcggagtctgtagaacgcgttcggtgtgggtggtgcgtgtgtgtgggatgatgagagcgagggcgttcctggccctaggaccgcttggccgttgagtggtggggtgagtccgttctcttggtgcgaatggtgacgtcgatggtgggagatagggctgcggttggaagggttggagattgcgttagggctgggacgacggcgctggttatgaccatttgatgcaatgatatccacaggcggtgctagcttggggattggaaggaattgattagatgagtatgctgatcgcgagcggttatggctcgggaaataacgggaatttccgttggatgatgtttgggaatcttgtaaaaaatgcgtggagtttcctgccggtaatgatgctttgtcactcgggctcaatggcatgttgcgtgtgcgcagtgcggtttgaggggtggcttcacgcgactgtcgggcctgctctactttggcagccgcgtatgatagacgtgtacggatatggaccgacaactgggaaatataaatgagctataattcctgaatgagcgagtgggcgcgttacctgtgcaatcctactcccatgagctgacgagcccgtactctttgaacgttgtcgtgcagctccattcgcgtcggcgctgtgagctgtggggggatctaaagtggatttgaagtcgccggcggctgttcgtttctggcctggggccaagcgagcatcaaagttcgaccttgtgcgcgaatgctttggcgatggtggcggtgatatagaaacattgccggctttgatcggcgataacgagggttgccatcgatctactgaggcgcctccattgaccggctgtatgtgcggggcgagttgggattccaataactccggatccacccacggtatcgatgtatgtccattcaatgtatgagagttaccgaactctgtcgactggctattaccattggccgaggaaggaaagctggaaagagagtctgtgacggtgctagcggaaaggtctagtcgtcggccatcgcccgatgtatcgctgccgcgctccgaggattcgatataggctgggttcgagttaccctcgccgggagcggggataacgacgttcaagccatctatttgtagtgacaatggtttcggtttcggcgattgtgtggttcgcgtcttggctggagtcgttggtttgtgaggtacgggaggcgtcgcgttgttcacagagtaggtgttcgcactggcctccgcatggagcaccccacgattagacacagcattgcgaccgtcattcatgatcaagggtggggcgtggaagattaaaagaagctgggatagcgacaatcggcaaatacgcgcgatctagctttaatcgcgagtttacgcggcacaatctcaacactcaacatgcatgtcctgtctcgccaagtcaccacattgagagttgggccgggaaggtccgataccaagttaattagatgcaactaacagtcgagatctcaacaagacgcgtgggagtactgtgggaaccagaagcgtctgcccgatcgagtggcgatcgaccagtacgcgcgcaagggttgcgacagcacgaggcggtaaatggggttctccaccgtgattctgaccccggatgaagggctcgacgggggtttggaaagaagaatgcgagcagtaagaactatttttgtatatagatacgccacaatatgctagtagcaaaagcaatcccgttgagtagttggtagggaaggctggtcttagaacaacgcgtgtgaggcgcggtcacgtggatggtactagaccaatttcatctgattcaataagtttatttaggaagagaatattctcaaatcatcactatatggtcattccgatgtaaagatggccagagatggttgtaagtgggtttacaaagggctatacttcggactatgctacgactccaacatctatgagactacctataacacacaagtaaggaaaacccttagaaatcaaatttggagcttcaattaatgataaaatatacaacatcatggagtcatgagaaatatgctccgaacaatgactcaactccaatgacgacagacatgtcaacaacaactcaacggaaagtaaaaataagccgagagggatctaagccctaaagaaaagcaagaagaaagaaagacaaaagaaaagaaagaaaagacaaaagaaacccattcctccgtactccatatcaatccaggcatcagtctggcaggccttcgatacctctaccagcactgagccaacaccaagtcccctagacgatggccgtcgactttctcaggtacttcggagtcagatcacaagtgatccggtcgatatccggagtctgagaaatgtggcgagccacatgagcaggcgctggcgcctctgtaaggaacattagcatcaagaacaagtacattttgttgatgggatcaacttacttggttcgttggggccatgccaggcccccatcttctccttccagccctcatacttctccctgcagtcctgaagcttgggcttaagcttcggcttccactccgcctcatacctgggcttcaacttaacccagctaatagagctatgagtatttctttttggatccattggacagatggtgtacttacattgtgcaccccatgaacacaccgaaggcgaccacgatgagccccaggagaagcttggtgaggatgacttccttccccgtgtcaacctcgtatttttcagcccgaggagagagcatgttgtcgttgacaaggcctgagataggagccatgtctttctaattgttgtttgatgtttgggaaagatgtaatgaagtctaagctttgatggagcttatgaaagatggatgtagttggagagttggaaagtgaagacagggggaattcacgaggataatatagcccagctgcgagtgctactaagcttgtttcggaactcattatggacggagtatgaagctttgagatggtttccgttacccgatgcggtgtcgggacgatggtaatacctcacctactaaaccacattaagtaggatgaaccttcaaatcctgggtttgtttaggactttcctgcttcgggaacgctctgggtaggtaactttgatgtgagtcaggcattctactcctggcatcgggggtcaaccgacggcgagaagcagttcggtcattgttattccgtagcgaatgtagacagcgtgggaggaggtaacgagaataaagcctgggcaaacagtagtgcattcatgaaatagttttgatataataaacatccaacataatgtaggtacaggttttgggtccaaacgccatctatgcaaaagacccaagtagattaagacatgcccaagaacaaatagatcacttgcgcttcttgccgcgtccacggccaccagagtcttcatcggggttcttgcgcttcttgccctccttgcgccagtaatcattgcgctctctcttctcgcgctcggccttcttctccagaccatcagccaccttagcgcggtagaccttgcggcgctcctcctgcttgatggatcgcttggcctgcttctcgttgcgcagggtagtgagcttctgcatgaggtcacgggctttcttttcctcgcctccgaggacaacggcacgcttctgcatgtaggtcggctccttgtggcccctcattttggtgatctgcgacttgaagggaagctcggcggctaattgtcttggcacgcggagcgggttgaagtgacgggcttgtctttcaatgggcttgtaggccgagtctttaatttgaggggtggggatgccttgagagtgacggacttcaccagtcaagcgcatgccctgccatccattatcacccttttcgccatcgacttggtctaacaagttggtcacaggattgtagtagcgatggggcttgatggggtaccaagcacgcaggaagacaatgtcactcatcaaaatcttgtcctcgaacgtagcacggtaacagccatcaggtttggatagcgcacgcttgatttgaccgcgaataccagagacagtcttgatggatgcaccttcgaacttggcaatttcgagcgcagaggtgaacatgtccttgatgaaggcggtgttcttgaagattttgtaaggatgaccagtgagtttaagcttcttgacaatttctgtatgctcatccacgctctgaacaacaccagtggcggcaatgcggaaaccaggattcttgtttgagaatgagttcacacagcagaaaccggtgttgggagcgacaaggggaccgtagaaggtagcgaagcagtgcatatgctcaggtgtgtacttaagcatacggtttcgcgtccgactgtcggaggtgctgtagataggcatggtctggaagcgacgccaaccaagcgagaagatcaatggatcgttgctcttgagaatcttcttgtgccagcgatgtttcttaatccggatctgcacgtagccgaatcggtcttcagtaggtgagagaccaccaacgatgacagggaagcgaggattgaacttagagacaaactcgtagggtacgttttcaaggacgatacgtgcgtaggtgccggctttgtaaccttcagcccgggcgcgcgaggcagggtcgagtgtatcgaattcggcgcggttgatatcggcctgcttttgcagcttggccttttgcagatcgtaccaatcgtcctcaccgaactcgccatcaataccatcatgcgttccgtcctgaacttttccgaaaccttcacggtcctcttcctcgaaacgcagcttcagttcttccttctttttggcatttcgctcgcgctcagcttcgaggtcagcagcctttccgggctcatcaccttcttcttcctcatcttcatcaccgtcttccttgataccgttgaaaacctcgccagattccaagtcttcgtaatcaccgtcgccctcatcttcatcctcgtcatcttcgtccatatcaccatcctcgtcatccgaggcaccgccagacagtttgccagtgatgaagcggagtttaattgattcaagcaactcctcgtcccgccacttccgctccagctcatcgtagtcgtactctggaacggcgcggaagtcggcttggtcttctttctcgttgtttgtcttcttgaagaaggtctcgccttcgtcgtcagcggttttgtcttcctcgtcctcctcctcatcatcggaatcttcaccgcgccatgttttcacgacatcaagtggagtgatcgactcgtcgtacatcattcttgacaggtcggtgactcggaaaggagggcgctttccatggagagacttggcattagcgagcatgttctccttccatcgaacattaccctcctcatcatcttcatcctcgtcttcgtcctcgtcttcatcctcgtcttcatcgccgctctcgacttcctgatccgagaccgaagagatagagcccaggtcagagtcgctgtcagcgaatgccatatcttcttcctctccaccggcatttccgttctgtttggccttaaagcgggcttcgaagtctgcaggtgcggacatgtcgagttcgccttcatcgcctgtcacatcgttttcgtccatatcttcatcggcctcttcttcgctatcggatccttcggggatatctatgtcatcttggtcgggtacggctacgcgggcacggcgtcgatcttttcggcccgtctcgtcgtcgtctgctttatcgagggcctcaccaccacggaacagacgaacaccctgatcggcctcacccagcatcttgcgctcgccctgaaggccaacaacaaggtgctcgccaagaccccggcgttcctcatcctcctcatcctcgtccgagtcccggtcaaaggtattggtcttgatatcgatgtaaactgcatccttgtctaccaggacaccgcccacatcagacatgggagcgaaaagcagcttctggtgctcgccaagcttgcgcctgttcgactttcccgttgccttggcgatctgctggttcatgaagggagttgggcatggatcgggcaagccctcaatattggcaacggtcagatcaccaacaccaggaacatggactcgggcgccatgagaggggaagttggtgccgcgcaggtagccgtagagcgcgactgtgcgatcacacttcgggttttcctcgatctgggtaggcggcgtgatgtccaagaagcgatctgcaagcgcgtaagggtgcgagttgcgccacacgagcggacgagggtttttcataacggacaagaatcgcgaaaggttgtgcacttcacgatcggggtaacggccgtttataacaccagacaagtaaaagagctttgcgcccgcgtatagctcactccagaaacggtgcttcaggcgcttcttcgcgtccttcaaagtgctgtgcttcttgaattgatcaaggtgagtaagaataccgaagacgttacccggcataccggccgtcgataaggcgttcaaaaactccatggtctccatctcgaatccaaaatttccgtcaatcatgagaagcacaatatctgcgatcttggaaacatcgatcgcggccgcaagagaatcggaagggcattcgatgaaggtgagacgcttgcgcttggtcgtaacaacggtcaacgggccttgcggcgagctgagggtttgcttggtgtagcggcggatcagagatttgagcagagttgtcttaccaactcccggcggtccaacgatggcgacaacgactggcggagcctcctcgggcatacgatccacgagggggacatgaagtctcttttctctgacctagaggagaagtccgggttagcatcaattgaccggtagaaaaattccatatacatacatcatgcgatcgcgcagcctgcttattgagctttccaggcctggaagtgacgaatgcttttggattagcacctgtaaagaaaaaaacattgttagcatgggctcgacagcaaaattgcagttttattggaacgatctcgccgtaccctcaaatttcttcttctctttggcagggcgatgcgccctgtttgcctgctgctccatgctatctgtcaagaggtataatacctcaacagatccactccttttattagaaaaagaaagaaaggcaagcgcaatccaggtagacgacttgttcccaacgacggtcaaaaaattagcagtaattatttttttgccaaagcggagtagataaaccttagtcaggggatctggagtgtaacctaaggcatcaacatttatccatctggcctaaggcataaatccttatcagctacccttatcatttaccggcccgtgatcacatgtaccggcccggtggctccactccgagccatgccctacctcaaagactccgctgcttgagctttcctttagtgtggattactagtgttagattccgtgcgataacgctatctaacatctcttaaaaaccagaggatgtaatttccctccgcgcctatcatgcggggcagaagtcgttgtacccgtggacctaatctaaagtacaagggctgaccaagcttcgacatcggaaaacccccgatttcccatactataaattcaccatgtatcctgcccgcgggccctatgagttcaatgtttctccgtatctaataaacctttgtgtaacatccaatctctaaactaccccgccaactgcatataatgtctgcacgccggccacccccagcttacacagcaccacctgattcgggggttcatgcaacttcccagttgtaccgctcaatctccgaaactgcatctagcccctctgcacggatcccgaaggaatcattcactatcagaccgtgttctgctcaagcatgggttgtccctgccggccacatctgccgcctgaccactccgaagggaccacaggtgggcgacttaaacatctggaacgcaaataacccacgagagcggatgtgggctgcgcgtacccggcagatccacgccacccacgtctcagtgggtgatcgcctgtggtcgaacttgccgtacctgcggcctctcgtgacgatcacgggtgactcgttgggtggcgggcagctgcatgatgttcttggaccggatggaaagcggaacccggatgtcgtgttcggaactacgcagtttggtgggcgggtgcatgacttgatgggcactcgatgcgatccttatgtgaacttgctcatgggcggagagacctttgacttccactgtcattcgaacctgactcgttccgttgtcccgtatggattgacggagctagatgtccatgatgtcttgaatgtgtttcaggtgacagggttggatgaggaaggaaagtacttcatggagacctcccctgcaaaggcgggtgagtacttcgagttctttgcagaagtggatgttctctgcgcactatctgcgtgccctggcggtatggcaccatcctatacgaatgtctcatttcaatactaattatatgctcaggtgatttgtccaattggggttgggatgataaagaaagtgatatgggatcaacttgtcgtccgctgggtgtggcggtataccaactggcagatgacaaggtcctggaagggtggaaggccccagaaagccctaagtacaagggaatgcatgggatgcagatgcctccccgcgaagaggatggctatgttggacactagggtaagaatatgaaaataaattatagagtcgtctattgaagggttcttgtcgctacacatattgccccgcgattctttagatatgatgtcattgcctcacaccgttacatcaacgtcaattcccccctttacaacatcccttgtaggccggactaggattagtatttaggaaattataaagccattcaagcaagggatttaatgagaatctggctttcagaaattgagtttgtagaagccaccatcccatgtcagacaggcatgtatgaccaatcacgacattttcaagtagcacggaagtaccgaagtatacaggatacatactatacaacgcgaagaaaggtaaggtgaaggagagaatgagaatgagaataaatgattggagggtacctgtttcaacgcaccttcccctaaaaaaatgcgtagccttcccctcgggcccctctcttctataaattctatttttctttctacttttcctcttccctttctccacgttctccatcttgacacatatcttgctatttgaaatcatgcctctctacaatgtgagcttagcttgatcttcaaaagtatccggactaacatctccctagatcactctgaagaccaacgcccccgttgaggagctggaaaagtgtgtccattaccaattatctcaaatgccttgatactaacaaatgttttcagggccaaggccttcgccagggagaagggtggtgtcatcagacatgagtacagcatcatcaaaggcttcacgtaagtgtgctggtttgatctatactatcgaggtgcatgctgatatatggatcaatactagtgttgagttccccgatgacaccgttcagaccctcaagtctactgaacatgtccacattgagcaagacggtgcagtgagccctcactagatgtccctagtcaacatgactaggaccgaggactgcagtccttgtgggtggtccgctttatgattgaatggaaacacgacatgcttgatatccgggggttattttctttttctttcttcttgttcttttttgacaagatggcttgataccaattatgcgaccttctttcatccgccatgcaatgtacttctcatgcttatctatcttttccaggtattcatacagatgatcaatcttcctgaatccaactatcagattgaagatgtgcacagtgcgtatgaatttaaacttgaaaaagccctgtataacacccgaagtataaattcacgtaaatacacctctcaccggtgagatagcgactttggaggttcgtgctgatctgcagcaattggaccgatgatatccgcaccgccggtgcagatcttccgtcccgggctctgacttccacttatcttgctccctatgatctacaattcacaatgacaacctcaatagctagaaatatgccttttcggcctagtcgccgggctcttccaattgggcgacctcatatttgtcgccaatcgtccacgcagagtcaaaactgggctggtcgcccatttgatgtcgccaaagacaatgttgcgcagctggctgcgagtccccgtcggccgttgacacttgcggacctactaaagtcagtctgatatagataacttataccaaagccgaatcaaaatgtgctaaattcatatccatccctcagacacggccgcccaccattgaacaaagaggctctactagcctctgccaacttcactctctccctcctacccgcccgactagcttctcggatccacgcattacgaaatctccctttcatcgtcgtgtcaaaccctcatgtctccaaaatctaccacaattacctccattcgctctcgaccctcttaccatatcaacagcgccgcatcacgactctcgaagaagagaaacagttcggggatgtattggcagacctcgtacatacccatacaaacacaatcccggtccttgctcgcgggtttttggagtgcaggaaatatgtcagcccggccgatgtgacgagcttcttggacacgcatctacgtgcgcgtatcggtacgcgcttgatcgcggagcagcatctggctcttcattatgcatctatgcccatcaacgataacccagtcgatggtgctgatgcacctgcgcccgagaactcgattccatcaaactatataggcgtcattgacacagctttgcagccggcacgcatcatccggatatgcgaggattttgttggggagatctgtgagctcaagtacggggtacgaccgcatttaaagattggaggtgagcccgaggcttcatttgctcacatccctgtacacgtggagtacattatcacggagctgttgaagaacgcattccgggctactattgaaaatggaaatgagcgtgagcccatcgaggtgacaatagctgctgctccagatgtgccaggaaatcacccgtcggtcccgaatgatatcgatgctggctttgagcttgattcgaagcttgccagcgccaatgtgaatgaaatcattgggtactcggccccatcgtctcagagtatcacaatccgtatccgtgaccgtggtggtggtattcccgccgaggttctgccccatatctggtcgtacagttttacgactttctccgatatggactcccagggctcggagaacggcaacatggatgccttgaataccatctctgcgagcggtggccatctcagcagtattgcaggtcttggttatgggctgcctctcagccgagcctacgctgagtacttcggtggcagcattgcagtgcaaagtttgtggggatgggggacagatgtttatctgacgttgcggggagttgggagaatcgactgagaaaagaaactgaacgacagtactaaataccctgaacaagatcattatttttggctagtacaaccaactcctgatacctgcatatagcattgccttctacatccttgccttgacggatggctggataaacatatctatgaaatccgagattaaagtatctggacgttgaacagcacccaatatccgaccgatctctgttgcagagaacataagtcccatgttttggaaaaacttgtcttgtatcgcggctggtgttttgggatttcgcgcatgtcctacgggatactcaatcagtatttgaggcaacgaggacccatctttgagatggaccgtcattcctgcaccaatactcttcttgtccagatccaagtagtcctccgtgagcctagggtcgggctgcaccatgattctctctcgcagggcttcaagctcctcgctcttcgcccatgagctttcgtctaaatagtcagcagcctctggtgggctacccttcaagaaagccaaggtgaccacatactgaatgcaatggtcacgatcagcagcgttgtgcagcggcccatgtttattaatgatcaaaaaagcagcagcagtcgttcgcagatctattcgctggatctgtttcagaggatcggacagcccctcttgtcgaaatcgacgcgcttgcaaaatggctgcctccacggccgagatagcatgcccttctaccggcatacttttgaacagcacattctgtaccgtccacgatccaaatggtcgtggaaggataaaccccgcctcgccaaaagtccgttcccaaaacccccatggtttcgcgctcaacgctcccggcgaaccaggctggtcgttctggaccagtagagccaactgcacagctcttctcgccgcatcgcctgctgcccatcctttcctcgggatagtattttcgccggatcggtacacccggtttggatggccatccatccaaacgtgagaaatagtcgccatggcttgttcatctgtcatcccgagcaaccaacaaacaacagtggcagaagccaatttgaccagcaccacatggtcgattccatagacattgaacgcattccgcatttgataacatccctgtatctcgtatgccttgacctgcttgaaaaaaaaaatctgcatcgtcaacggcggaccataatgaacccgtcgaccagacaagcttgcacgcgacagccagtccatgactgagagtatagctccgatattatctacaattcaatccatatcttagtctcacgagcacaatttccagccccatgtcttcaacaagccatacctgaaggatgtccccactccgcacctccaagcgcatcattatgatccaagtaccgaatcaggacacccagatcgaaagcccccttgtccggatcgacctgcaactccgttcctggaaccctgaatccatccggcacgactgtgccctcgatcacgggaccgagaagctttcggcattcggtgctcgtcgctgccgtctcgatggcgcagcccattgcgtctagcagggctgtccgtgcacatttccaaatcgcttcgtcgtcttggttgagggagtaatggtagacatagttcactatgtcgactatcggttggtcgtacgggcgagacatttatggatggatgcgtgttttagcggtgatctaatttgttacgattgagatttattggcattcgcaatattatatttcgtgtagggcacatgtagaagtcctcggtggatttcctagaatgatccggtcgtacacgtcggccttgttcaatgccaatatcgaatgtttatttgtcttagggttactcaaacgtatgtgacttggtttatcacggcgtagctattggctctactaggtgccgtcgcggtccacacttgtcagcaacctatagaatggaagggaacacacaattgctaataagtagtgtaattaaaaatctctaaattgcctttttccaactgccagtaccaaaaaccaaccctagtagttgaatagtcctatacatgacagattgaagacaaactagacaaactacctaagcattacggcgggatggacccgattaggcaaagtaagaagctagttccatggtttcaaagattctgagagaaccatctatcatcgctttcgttcattctactaccgctatcacctcacctcgatctgcgtgagctaagcatctacaacatgcagtcgggcctcgatatctgctctctagcggtatctcgattatggggaaggcgtcttccaccctcagagttccctaagctgaatacgctagccggtcttcctgtcgagctattgttatcaataaccgacttcctccctctagatggttgggtttgcatttcactctgcaatcgccgactcttcgccatattcaaccatcgaatcaattccgcccccttgttaggagttgacaaactgcctgttctactccgactggaacgagatctaccaccgaattactttacttgccacatttgccatattcttcataagtatgatgactatgatggctccgaatgcttcggtctatctggctcagtttacgacctagtgtattgtcctcttccatgtattaagaaatggaaagaagggcctgctaggttagaatttagattgagtgaaccaggaccgatcgggttccatgtgtatcatagggtattttttctgcatattcagcttgctatgaagagatgctgctatggagaaaagtatggaatcagcactgaagcgttatcttacacccaagttcgaacttactccgatgaaccagaattcacctctctcttttcgaccgacgcgcatatgcatccagagatactggggctttgtataagaacacaacatatggtatttgttcactccagcaaaccaaagctactactttctcgaccgaaaattaccgatgcgaaagatccttctgagattatttatatttgcacgcatgtttcgcgtctaaggcgtgctgaactacttgacctagtggtgaacgcttatcttactggagagaaagcccctagttacacttttacgtgtgaaacatgcaatacagtttgcttgattgaagtttgtgaatatggatctgatttggctctagtccttacaacgtggattaatcttgggcctgttctaaccccagatgaccctcgatggaagatctattgtaattcgccggatgcttctgaagtgactctcgatccaaatgatctgaaagatagtccacgggtcttgtttgaaaatgtgtcgcctcagtcgttagaggccttacggtcatgcaacctttcctatctgaagggccagcgatacaagaaggttatgagcctactgcattggcacaaaagcatatggtatctaccaagtaatgacttttggggaagtcattggaaatacggacgaacccacctcgctatcatatgctcatgtggttatttgtctgcttgcttccttttaacctgtcttattattgccatcgtacattattatggctaaacgagaatgttggttgtttacaatgttagcaaaatagacctattaaagtgacctctagttcgagtgggcaaatagaggctgaagacatctactaacagattgaaaagacaatgtccaaaagaatttaaaagacagcgtgcttgcctgaatctacttccctcgctcttgcctagtttcactccgaggccttccttcccataggcattctactactataacatcactttattatcatctttctatcgatcttttttagggtcttttagaatataaccgataacctcagcctttctttaccttctgtgaacttgattttgcaaaatcacattacgatcagattactctcacaatggcattgttccttgtacatcagattttcatttcattctaggcctcgacatttccgcgctccttttcgcggactggctcatcaacgcttgtgtccgtccagttacttgggtgcagctgagtgattttttcttttttatcatatctggtctctttctccgtgagtgagacctgctatcccaagctctaaggcaaattgtacggtgcttacctttgacacacacagttggtcttgagacttactgcttgcatcctcggttgccctgcttcttgcaaggaagtgcagatcaatatgtcacaaacactaagccgggaaaccaccggagtgttaggtgcccgttcgattcaaaagaattgagtgcattttcatcagaatgctaagtacagaaagggaaaagaatagggagaagaaaactatctacgagttccgctccctaggtttaggcgagctctttcagcaaaccacgcaaatggtgattctagcttatgttctaggaagagcgacttcctccataagtggaaagtgcatatggccgcggtacgttcagtgtccctaccctcagatcgtcccaggagaagcacacaatactaataaagtactagcccataatcagaattctcaatctcacaatggtactgctccttgttcagcaaatcttcacctttattctgggcgtcggaatctccgggctcctctttgcagcggcctggctggccatcgcctgtatccaatgcgtgccttggaacctggatgtcatagattataagccgggaaagcactggagaagcacacagtatcaataaaattttaggccaaccgtctgcagaacataaaactgcagatccccactggacttacggtgtctgtggagtaatctggggcgcacacagcctcatcatgcagcaaggaaattttggaccagcaaaaggaaggaggccatcgagataggagtataagctgggggcgaagtcactgccccccagtaagatgtcgctgtatttgggggggacaagttaaaactgatgcaagtatacagtctacgtgactgagaagaggagctactttaccaatgtataattttgtataggatatatggaagcaaaacaagagatattccgaaactccaataatatttatttagtagttatgtggctctacataaacaaataacctttagaatccaccaacacctctcactcgctgtacagcgccaatggctcccctagcccaactgaacctccgcttttcaggccccattgagcccggcggagtctcgtcggtcttcgggtcatgccagcagccatccttggtacttgcagcgccgtatttggcagtattctggttacgatttatcaactccgtccaagcacgacaaacgagctcagaatcaataagcacattgacttcctggctgtggaagaatgactgggtgtcgaggtttccattgcctagaaagatgattaaataaattaaattgtcgtaatgggatctgggacttaccttgaatcgcaatctgctcatcgacaatcatcaacttgatatgacagctgcgcttcttgaagctattatgaatcggacgagtctggtccttgccgacatagtagcatatccgtagacgagacttctcttcgtcggtttcgagggagttgtacagcctgtttgaaatcatctcgttggtcccattttgaaatggaagtagctcgcctgcgtcgttatagccaaggcatagatagcaggataccacgacaccccggcgaacggcgtccaggatgggttccagtagaggttcggcattcatatttggtgtctgaatgaggattgagcgctgggcgttgttgatcgcggacagccacgccgcgttttgcggagtgtggacgctgctgtgatttggagcttgaagaaattgaaagttagagtcatacccggctgtctgagggagcttatctttgtgggtttgacttacatccatatggttccctgtttaccaatgccattgcgaagggctcgtgtcgtggtatgaccatataagggttgaacatatcatcctggtcaacttctggtgcatcgcctgttgtgtcaagctggatagttgtatctgttgagttgttagatattatcatagatagtgcacaggtaccacatactgagatgacggctaacagcctgggtgcgcgtttcgtcaccttgtgggtagacagaatcattgactctccgggcctcttgttcaaagtcattatcataatgtggagagtcggtagtatgctcaggaagaactgtatcgccacgctctgtagaaataccgtcgtaccttcctacatggcatggtatcggagcatctttggctggggagttcagaagtggaaagggggggtcgagagcctttccccacgacagcaaagcagcatcatagaaagaatcaacaatcgggccctcgatatgagatagcatctcaaggttgtcgttgtcttgtatgttactgctctgtatgagagccatgcgccggtcaatcacggtaaactttgcatggaacgttccaacgacaggccggtggtagttgatgacttggagatcgacattggggatctcgctcgcggcaggtagcttcacttttccaccgacatattgatcctcgtggacactcagtctattctcccatgcctagtggtttattagaatcatatctaggtcgtgtgcgatatatatatcaaaagtaagagcactcacctgacgaggatctccgcgatcatacatcaacttcataatcactttctgtccccgttctcctgctcgtttggagagttcccggatggcattcgtcaccaatgtcgatgcatccgagtggatccagaaattggtacccagaaagacttcatgttcagcgcgcgcaatgcaattcgctaaatggcgacagagatcgggtagcggggcgacaatggtcagtggtagaactcctgtgctccccagcagccggggcgatacgacccctgacattgggttattttctaaacagcataagacgtcatgataaacctggaaatatgtcagattgattcttcacataatgatagaggaaatttgttcacctttaaaaatagatcactcgtttccacagacccaaagttcccgcaagtgcgagctttctgcagctcatccaacgcttcccattctaactcattttcgacgtctgattgttccgcgcgatcgagtatatccgacgcgtcacggctctcgtacagattgtaaaagacatcttgcggcgattgcgacgagtcaagagccaactcccacgttactgtcggctcttgacacatattgtacaccttgcgtggtaccatcttgcaccgaactcgattggggctcggaggttgtcgaatgaataaaataatgccgacggtagaaaaggatacggtcgcagcagctagcttgagaaattcgacgcagttcaagagtgttccagtcaagttccacgggtggaaaataccatccatgactgggctgacgtagggttagccctgttctttccttcggggtttcttctttgtagagacacgcgtcggggacttcgatgcgaatggagtcgaacaacggtgatgcctagaatattttctcttagctccatgtccttctttccaaacttggaaggaccgttcagccctatgacgtctgtgctgtataccccacaaaagtaccgaggggatcttgacagccccggtatttctacgatatttctatatgctggaatattattgaccaagccagtagaatttgtatttattcttgaggagattaaagaatatacataaagctatttccaaaaggcgtgggagaaaaatcataccggtggctctccgatatatatgaaacatgaaacccctaagcttttctagtgcatctccttagttcgagatatctccgctctaaactctccctgttgcaagcccgcggcttcaggcacttcaatcccaaggtcaatatctcgcactccccaaacagagcgacggggtgtcttgatcccagtctgcaaatatagatctagttcatcgacataatcatatgcagccttgccagtaatggcgtgcctctcataagagtcaagtccgcctaagcgccactcgggtaagggcttgcggcaatctcccaggtcatacacataaccagggcggcccttctcgtcaatcaccttccgacgggaaaacttgacgtcatgcccaatcggcgtgtagtccttgatctgctccgtcctaaatcccactactggatgaacaaactcaaatgtctctcctagtaggtttccctctttgtcaaaagaatcatagtttccaggccggcgcctctcagacccgttggcgtagtaaaatagcgtaaagctgtcttctagcgggcctgttccccagccatagctgcgtcgcttgttcacagaccggacgggagacgtggagggatgcttgagtttgaaagctgaagctattgctgcaaccttgcgttgggtccagccttccaaagactcgggggctggattttcgacaagcgttgaaatgtggcgttccctctcttctctttcctcggagatagtctcctcattgagcgacaggtggggtttgatccggtccagcatccaggagaaggtaatattagacatttcttccatgtcgccctcgtctttgagggtttcactcgaacccccgccgatgttgatgtgataaccggggaaccacacctgtgtcaatgttcgggggtggagctggtgcttgtggtcatcttccaactttaggagcacgcgggtctcctgattcaaggctgtggccatctcatttagctttcgggctgcgttgttgacatcctcgtcactagccctgccgctgctcttgatccggattgcgtcttgcaagagatcgttccattttttagctttctgatcgactattctcttctgagtttgtatctgatctgaagtgacgtttccaagtttatggagataccacagagtgggcgagaaggcattgcggtgttcatcgagcgccaaggcctgaaatgcatgtttgatatctggaaccgtctgtcactattgtgccccacaaaccaccttgaggcaagaaggaaagacagatcttaatatacttactaggtgaaagtccaacattttcccatccattcttatccgaccaccacaacagccacgatggcaatgtcatccccagtacctccggaattccaatagcgccgaccgtatcatagacgccaacaatttccacgtcccttgatccctcctgagcccagtcaccctcgggacgcttctcaaacacgaaagtctcaccccgagcgccctgattctcatcagcctttccatcaatccactcaaaccagaggtcactgcaatagaagcgctcgccgggtgtatttttcttatagacctcccagagatcgggaaaccgattcaaatccctcttacagcaaataccaatatccgagattaagcccgcaatagcccgggccgtgaacgcgcccctcgagaaaccaaaacacataatctgatctccgggtctgtagttcaggacacagaagttatacgcttcgacgacattcccttctaagccctggccaatggcgccttcgatcctttgtcccaaaggacctgaggtcgtgccgattccggagtcataccagactatttgctgccattgattcccgtgttcgtcggttccgacactgttcagggcgcggcagagacgcgtcacattagatgggacgtttttcttgcctgagacggcggactgccatgttccgtcgcagcagatgatgatgcgcttgcgcatggggtgagtctttgaatccctcctttgttgggctgtgcatgctggctcatgaatctcggaggatggaggcattgtgtatgtaaaacggagtctaatctggtataaagaggattaagcttagaaggtggcaatgacaccgtctatatagttttcgttttcacccttgtctatgttttgattggttttttcgcatggctaggtttcatctcgaggtcgctttgattatctgttttctctacctgcatgaagccccccgctactatacgaactccagcgccaccgtcagcagggttcgagtcacccgtacgggggactacagtaaaacctagttattgcggagcgaagcgaagcaagtataaaccagaagatcttactctgtacagtgactgttcataagttttaacaccccctaaagccccatatatataccgccttcctatacagtttacaccgccatattatggaggattgcggcagaacacaaggtaggggtacgtgtcacgtggcaaggttttttttcccaggggagctgaatatgacacaagcagggagttgatctagccgaggggtcgctgtgaagccaataagccagcaagagggctttgcgcagcattagaagttagaatcagaagagcgtggtcctcgtcatttcggatcgatgagccatcggaggacaggtggggaggtaggagggactcttcccgggcaagatcactcgtacaatcccgtcacgttattcgttgtatacagtcctaggtcgaaataatttcttgtcggagacctgggggtatgagagtgttatgaaatgcacggacctgcgctttggatgaggtgttgattgaatataattccgcagtctccactgccaactttgattccgcatggtatagtttacatatacaacatatttacaactagaaaaagcttgtcaatcagtcatcagtggtgcagtctcctgaaattagaaattcagagatctccagcgatgtagccatcgcaggcaaagattgcgagggcctggggcagactagcgcccgaaatcttcagttgtacatatatcgctatcacttgtgtgactgatgagatcttcattgcattcttagtgccccactagggtactggacacgttcgaaatgcatcaagctttcccaaaactccatgtaagcacttgctcggtatcggcatcaaaaaagccgatctaccttatcgtggcaagatcgccgctaattatattaccataagattgtccgtacttagctcggaagcatctatagagtcttgtgagaccacttcaggccattcccatagtctagtggaaatcgattcacaaagaggggaagaagcatagagcattgataagagaacagtgaagcaaatccaactgtgacgtgacaaaaccggcagaaatctttctcaatattagctgtggtctatacggagtactccgtacgaagacagaaaaataattttcaatatagaaagtagggggcctgacaggtaggcatcagaagcaccatcctgaggctatgctcgcgtaaagaatccttcacagtgatgtacatcgtatagaaacttgcgataatccctgtcgcaaagttgtgattgggcagatggccttttccagtgatgggggccgtgacgggaatattggcgcggaaaaaaacactggagtaccataagcacttgcgacgatccatgtaagaaggaaatatgctaatgcacataatccgtttccatggaggagcaagaaggggcggtacttgattgagaatccgaggatgtttaattggggcgtgtcgcaaatgtcatataaactagaggctcatcgtttgttctgctattgaattgacacccaagtatgaaagccagtaaactcaccagaccggatggcaaagtagcccggctgcgagcatcctgtgatgcttgcaacgaatccaaagtccgatgcagtcaagccaagccaacttgcgcccgctgcgagaagcagaacatcacttgcgcatatggattatcccgccgcagtcacaaagatgccccacgaattggaactcaacctacgacagtaccagaatcctccgaatcgaccggcgatgcgtcctcgcaatcagccgtgtgtcccccttctccttgccgggcaatagacaacgcaacacaatctacctccgagacgtctgatggaatatgcaacaaggacacctttgatatgatggctgacagcctgtcttccttccgaccaaatatgggactgtataatccacaagtattcgacgcgatcgacaacacattggatctacatacgggattccaccaagtggaagacatgctggatggctacgacttcctcgaccaatgcctcagcctacctgcacccgggcatacagcaaatgaggatccaaacaccgaactagaagctacaagttcccaaaggaacaatcatcaccactcaaccactgagagtcctagccatcataagtgtagctgcacatcccatctgatgaaacaattggtatctttaccgcttgcttttgagaatcaggcaaccttatcatttgatgtgcagctctcagaactgaaactagcagtcaacgtggcaaaagcctgtatgggttgcagttgcaccttgcatgatgatatggcgatgtgtaagatcccaacacgttccacccaagtcacatcgtcacgacgttgttcatagcagagaacaatagaccggaactcttacaaagcaccatactgacaaatcggtctatacctttctagtgatgatcagcattcttatcgggcgagtcattcaaggatttgagaaaaccctgtcaataatccagcccatggcaaatacagaaactttgaacgcgtcgagcggccccccgcaccgcggcggcnnnnnnnnnnnnnnnnnnnnnnnnnnnnnnnnnnnnnnnnnnnnnnnnnnnnnnnnnnnnnnnnnnnnnnnnnnnnnnnnnnnnnnnnnnnnnnnnnnnnnnnnnnnnnnnnnnnnnnnnnnnnnnnnnnnnnnnnnnnnnnnnnnnnnnnnnnnnnnnnnnnnnnnnnnnnnnnnnnnnnnnnnnnnnnnnnnnnnnnnnnnnnnnnnnnnnnnnnnnnngggcaggcccgggcacgcacctacactgtcgtgggggacgctccagatcgaggcagacgaagaagacgagctgaagcagcatatgtggctgctacagttcaagaaatttcgaccggttttaaaccagttcaatacatatatcggccgactgggaggtacttatggctttggtgattctgctcaggttaaagcctaccagtgcatacatatgtggttggcgcaaaagatggataacgtgaatcatcagtataaggcccaagaaaagtgtgaggggcaacttgataggttagatactgtcaatcaggtagcgcgatagagccggagaaagtgagatgaagggaagaagcctggtagtcagatggacacaagagactggacctatgttcatattagaggattcacataaaatgactatagacgcgtacatgaagatggcgattttcttgcgggcaggtttagtataaagcaggggcttctatggtgcattgatggctcatggatagatcctcggtatagaatcaatttgtgttgttatgatgtatggcatgcgtgagaatctaactgactactctttcaaatccgaaagtaaccctagcccctatgcccctgcgtatgctctcattattttcccacttccaagctggtcatcgccaggtccctaagtgactcgagcgtgcaggacgagccgagcaacatgaccaacggcacatcggttgtcaagctctggtagaaccatgttcggaattcagccccaatcatactgtccatgccgtattgcagcaaaggcttcttgacatccacaacctcgtacttcaaaaggacgaggttgccaaatcgccggcggatgtgatccagcacagcctcgtcgagggtgtgacctgattgcatcagggtcgtaacctcagcaggtaggcttccgttctgcgcttgcgatgactcatccgagccaccgtccaaggcgctggctaaaagattggcgcgtggatcgtccaaagctggatgggacccttcgaagcctctcttgcgcaattcctttagtccgaaggcttctagacccgtcagaagatgggaagcggctaattcatcgtgtgcgtgcgatattcccattgtagcgctggatgacaaggcaagatcaatgagctggaggagctcgtcggcatcaatggcctgaatccctttgcgtaaaaggagggcctcaatttcgggattatcatgtagatagccgacttctgagatcatacccaagccaaccgcaacggccggatatccttggttgcgcaggaagcgagagaactggtcaaggaaatggtttgcggcacagtagttagactcggtcgcagtaccgacgctgccagagacggaggaagtcatcaggaagaaatcaagatgagagccccgtccgtgcatctgcaggctgttgtacaaattccaagatccttgtactttggggtcgatgccagtatgccagtattcgttgggcatgacagagaaaattgcttcattcagacccatggccgcctgcacaactccgccaatctcacccatggcggcagccgcagtgataacggcttcgacatcagacgcctcgcaaacgtcacctctgactacctcgcatctggcacctgatgcttcgaggtcttggaccaggtggcgtgcagctgccttgtcaataccggatcgacctaggaaggtaaatttccgggcacctcggttgaccatccaacgcgaaagagtgcgccccagaccgcccaagcagcctaccatcacatagctcttctcactgtcaaattgcgtggtgtgcctcaggggttggattgggatggtggactcagcccgttcaagattaatggccaccttgccgattctgctgcgcgatgagaagtaacggaatgcctgctcagtctcaccgatatcaaaaatattcagcggctcgaacgcggtgatggttccctgccggtagagtttcatggcctgggaaagaaggtcattccatagagagtgaagctgctcactatcggtgtggtagagatggctgagatcgaaggctgtgaaagtggtactttgtaggaattggtccatttctagacggccagcggtggtaaggtccatcttgccaatctccacaaaacgaccaaacgctgcacagcacctccacgtcgcgtgtagctgatcgcctgtcagagagttgagaatgacgtctacgccgcgcccagacgtagcactgaagataccctcgaggaaagaagtatcgcgagagctgaagatgttggatgctttgacgccaagtttatccaccaagaactttttcttctcatctgaagagacagtggtgaacaccttcacaatggttttgttagcatgcattccataaattgaacggtttcaattcgacttacctccgctcctgcatgtagagctaattggattgccgcgatgccaactccgccggctccggaatgaatcaagaccgtctccccagcctggatatgggcccggtagtgcaaggcatagatggcggtggcgtagactataggtaacgtagcgctaatgtcaaagctctccgcatcggtaagcttgtggcatgcccactgaggaagggtttgatatgtttggaaatggcttggtgccatggcaacgacacgatctccgggagcgaaatctgtcacaagagaccctacttgttcgactgtgccagcgcattccaactgacaggtggcgtcgggcgtgtcgactcgtccaaccaagacataatagtctttcgcattgagaccgaccgacgcgacccggatgcgcaaatcggtcgggccaatcgtttgtggagctttcagctgctggaaataaatagtgtccagctgcccagcttgctcgatggcgagtctcacgtctttggcatcgtgtaagctagactcggtcgtctcaagtccctgcttgttgcggaagagggtattaatgctgtcatcgggtgtgaaccgcgagacgtggaccacccccttgcgctgcgcaaattctaggtctggcttcttaccaggctgggtgagaagagataccagacgcttcgcagtcatatggatttgagtttcaggctcgtcaatatcataggtgtagagcttaagcgagggttgttctagcatcaatgctcgggccaggccagatacaagagcaaagtccggcctgtcaccatgcataatattaccattggtaacccacaccaataatgttgcgttgtctgtcatgaccttgacgcgggccatctcatcgtcagagatgacggatagaagaggagactttatctcacagaggttgaaaattgttgtcccgctcgagacatgtgcgggtgtgagctcatttagccggacgcgcatcacccattgtccttggatgggtttcagggtatccgccagtgcagatccgagcgcagttttctcacgctcaacgatgaggaatttgtgcctttgcagtgaaacttgttgcaattcctgcggcttgcgcgcaacgataagtgttgtaccatcctcggaaaggcggacgggaagacaatcgagaccacgcgaggcaaatgaattgcttgtcaatccggggcataaggccaaaatggatgcgtcgtcggccatcaagccgccaaaggtatccacggcccggtcgatatgttcgttcatcgccggaagtaggatgaggtcatactcatggtccagttcagtgggactggagcagcgctctccagtctcaaggtttaagagacctcccaagatagtgccatcatcagaaactgatgctgtgctatatgcggacaggcgcttgaagctcccctgtgcggatagaagtcccaatacagccagggtgatgtcttgcacatcatttccaatttccaaaatacggaggcggggatttttgtgcgccaaaaggtccagcatagcgcccatcttgaggagcgggccggacaccggtgaatgggcctcatcagcaaacttctggacatggtgctgcgcatcatccatggccatgagccccagtccataaatgtcaggcttccaaagtacccgaagaactggatggcgcttatcttctatgtctgcttgactggtggattggtacggggagagtcgaatatcatcgaattgagccacaatttgtccatcgctgtcaatcatttctataccagcatgagtgtatccgaatccaatccgtttgacgactgcatgcatttggcaagtctgattggaggaagtagaagtgtggacgattgccgatggcagcctcgtgggtatctgggcacgtaactccttaggtttgccattggtggctgcaaccacagctagttggatcatgccgtccaaagcgattgggtgcactggatataccgaaatggaatcgccacttgtcttcaatagaggcgctgtagcactagcgaacgactccgatttcatacgcggggtataaaattcggagatggtttggaaggttgggccatagttcaacccctgcctgatgaatttttcgtaccaagtccgcttggctgtggattcaagcgctccgcttggtggcttatattttgactgcagagccgcgttgcgtgggtgaatagcgatcgatccagatgcatgctgtaccgcagatccattgtggtagcttgatatagcaaagtcccaccaggtggctgatgtggctgcattggtaatgacagacttgtgcagagaagtgaagatctccgcgctggtcgagaattctgtgttcaaggtcaacgcgttcgtgatgttgacgttggagaattgaaatgtagggtccgtgcgcgccgcgtcggtggcctgcataacagcctccatcgccatcgccaaataccctgcaccagggaaaacgaccgtatcaccaagcttatggtccttaagccaggaaacatcatccaccttgaggatattgcggaagatcttgtcgcgggcatttccaccggtgagtaggctacccaggagttcatgatgcggatacttgcgctgcctgtattcaacactggcgcggcattcgttccagaggatgttctcgtagttgaagcgatacggtggaagatctgtgaccacgcggtacatagagcgcacagacttcaaccctgtctggaggccattgacctttgaccaattgatctcataccctttgagccacaggtttccagcaaagctcaggatgctttccatcgagtccacattacgcttgattggggcagcatatttgagttctgcgccggcttttgccaaggtttgcttgatcggcagttccagtgaagagtgagggccaagctcgataaaacagtgctccgtgagttcatgaatgcgttcaatcgcatgagcaaaccgcacctggctttctaggttgcttctccagtaacttgctgtgaatccagatgacttgagctcaccagtcaccgaagacatcacagaggcaccctggggctgtcgaatcgagggacccaaactagggagggcccgttccaacagggcctggtactcttctccaatggataccatgtggtgggagtgatacgcctgcccgcctgtcttcagcttgcgcgcgaaaatattcctctgttgcaaagtcgccaagaagatgtccaatgcattctcatcgcctgagacggtgaccccctccggagagttgacgcaagccactcggatctggtcatccagtcctgctttcgcaatttcgtccgtggtggagctttcagacaagccgatagccatcatagcaccgacacgagtagattttgagacgcagtatccacgatagtaggcaattacgattgcctcggctgcagagacatgacctgcggcgaaggcagctgcgatttcacccgaagagtggccgactgtcatcgtaggggcaatttcccaagaagacagaagtcgaatgagggcaacttgtatcgcagtacagcatggttgagatcgctgtggtagatggatgaggcttgggttatcaacatccaagatcgcctccatcagtgaccaactggggggccctgggaggctcttgaggactgagtccatctccgtgatggtatcccggaaaagagaaaattccgagaggagctcacgacacatgccgggccactgagacccctgtccggtgaaaacaaacgcaaatggagtagatgcaacacctgtgactgggctggctgatgttacccaggtgcgtgtctggaaactatgagagctttcctgtgaccgcggagcaagtaaaaaccctctctcggcaaagtgagttcgcctggagcccaatgtatacgcaaggtctgcaatatctgtgtcaccaaattcatatcgtgcaaagtccgctacgcgggcttcgagggaggcggttgaggcagcggatagaggtaggatcactgtggactgggtgatgggcagttgtctgagctgccgagatgaactcaaagtcttggtaggctgctctaggataacatgacagttcgcaccgccgtaaccaaaagagttaataccttgagtgatgaattagctgattggtcttcttgtctgtcgaacacgccgtactaaccaacacgccgcactcgagacgagtggtttggccaattcgtcaactcagttggaattttgatattcctgtcctcaaccttcaactttggattgatgttttttaagccatgagtgggtggaatttggccgcgttcaagggcaagggtagacttgatcacgcttgaaattccgctcgctgcttcagaatgtccgacattacttttcaccgacccgatcatgagggggttatttggcgtgcgttgaaacacccgcgataatgcctcaacctcgatggcatcgccgactttggtcccggtgccatgacactcgacaaacgtaatgtcgtccggaacgattccacccttggccatggccttttggattaccgcctcctgaccatcggcgctgggtaaactgattccagatgtcttgccattcctggatacaatcgcatttcagcacaaagccaggagttggggagaaaaaaaaagcttcacttacgcgttgaccgctgacccacgtatcagactccggattgggtcaccatctcgcagggcatcttcgagcctcttgacatacaaggccccaatgccatccgcacgaccatagccgtcggcagaagtgtcaaatgtgtggcacgctgatgttccggagaggaccccagctttcattgtagcaatatgttgctcggcggactgaatcaggttcgcgccggcaacaatggcggcgtcacattcgcgattctgcagggctgtacatgccatgtgaagacagtagagtgatgaggagcaggctgtgtcaagaagaagactgaatagaagcgaccaaaggtgagaaatcataaattccagtggatatgttgcaatttacgacttacctaggtcctagaagattgaagacatggctgatgcggtttgccaagattgtagtgcctagacccgttccagagtaacggctcagactacactggttagctatgagacctaacaacggacccatgaaaaggacaatatgtacttactagtcagggtcttttagctgcatcaccatgtagtcaacagtgaaatttcccacataacatcctgtatttgacccagatgcttgatccagaggtattcctgcattttccatgcattcgtatacaacttcaagcatctttcgttgttgagggtccatatacttcgcttcgaggttgttgatcccaaagaaactgttctcaaactctcgcacgtcatcatcaagaaaataaccgccttctgtgatcatacttccggggcgatccatgccctgggggtgatagaagccgtcgacattgaaacgcgatttggggaccttgcattgggccgatctaccattggaaatcagatcccaaaattcacgagggcttgaaacttcccctggtaggcgacaggctgatgggagataaatattattacaattcacaaagacaatcaagaagcatgccttaccaattccgcagatggcaatggcctcaccaaggccttcatccgcaggtgatgaatctagtaaaataggcgacatgatgaggttcacgcggggcaaataaatttgagcagccaatattgtttcgaaaaagaagtaatagttcctatttggaacttattgagcgtctcttgatcatatacatatgtatatgtttaccttgaggctaagacccgccatatctggtctcattgtgctcattgaaagcgatcgccgacaaaacacctgcatttacagatatcggaattctctggaattgcatgatgaccccggtaaacttggggttaccgtgtattttgccgagaaatatgaagttttcggccatctgggaatcgaagaacgggcttcgcggctcgggcacatgcagtcaccgacgagtctctacgccggacattcaatctccggagtagcccaatcgcattttcttggggaaattttgctctggctatagattctagataacaaggggccagttactctgcttgttgagagatttctattcccgtgatcttgacagtgcatcagaactagcgacctttccagccactagaataggattttattcttcagatatgattaccaaggcacatactcgtccttcggtcctgataactgggtaaaagcagactggatcctgtttacaggttgaaatgctcatgatggaggtagttgcggcgaggggggaatcggacatgctttggcacttgacttcaagaatcaaggtatgttacatagaaaatttgtattaacaagttctgatcgttcaatgtttaggatacgtggtcttcaccactcttctcgcccatgagccacgggaccatttgaccgatctcggaatacactcgttcactgcggatgttacgaaggacagtgacattgagcagttgaaggaggccatttcaagcttgacagaaggcagtctgagtgtgcttgttaataatgcgtaagtaatatatgtctatttttcgttggctgatctaacgatggcttcaaacttggatagagggatatgtgagtgacgaagagccaaaagaggtgataaatgggctaaaccaagcaggctatacgatgaccgcaatcgatacagatgtgaaagaggtagagaagatgtttggtgtcaatgttttcggaccgatgcgaatggtccacatcttccaccctctacttatcaaagccagggggaagattgtcaacattggcagcgtgggcggtattgttccttatgtttatggatgcaagttgacttttgatcgcctgaactgtgctcgagataggagctgaccgactttgaagctagctacaatgcaacaaaggccgctctccaccactggggcaacaccttaagagtcgagatgaagccgctcgggtaagcctctctactagaagatagtcacccgcgctgacttcaataaatgaagtgttgaagtggtcaatgttatctccggagaagtgggcacgaacattttgaaacgggatcacaatcgcaaactaccagaggactcgttttaccgcccgctcgagaaagagttcatgaatcatgtcacaagaacacctcgtgagcatttatctatttagctttgtgagcgaattgcatagtactaacgcttgatacaggcacgactacaccggcggagtattcccggtccgtcgtcattgaagtgatgaagcaacactcgactgcttggttctggacaggagccagctcggggattgtaagatttggcgagcagttctttcctcgtacgctttgggtaaactctctataattccgtttggctgaacaccagcggtacaatggctaacatcctgtctctaggactggatattcactcgacaattcaacttgaacaagcttcgaatgtgagaattgagccaagtgactacatcatagaaagcgcacacttaaactagcttcatagaaatctttcgagatctacgaaattcacccagaaaagattcatcccatcacactggtaatagtctagttgtataaatttgattgctgaatgaaccgttccacattcggaagtttgattcaaaaagaacagcgacaaggctagactttcacttaactcatgccttggtatttcctcatttggcaatcatctcacgttcatgtcgtcactagcatctcaatcagtgcagatccatgtgatacccaaactttgaagttattataagtgtcacgaggatacaaaacctgtgatacgagggatgcatgtaactaggaaactaaagataggaaggaagaagaaagaaatagaatgatacggcgagcccacttataatatagatcgaccaatcatatcaacaaaaaccatcgtcaatgcaaacaaaataaacaccacgagcttgttgctcgtgacataccggttttatgatatatccagtcttgcagaccattgctttcatccagctaggtaatttgcatatgtaacgctttattagaggtatttaagggaacttatgaaagtggcaaagaatatgtatttgagaaatgaaaaggtcattagaaaggttattgaacgatatattgttcttctgtgtactgaaaaggtaagccgatataggactataaaatgatttcccttcgctctagcaagtatggattttacatgactgctgcagaaagatggcttcacttgcggtgatcactgcttcacatccgcgtagtccttttccaaaatccccaagtgctcagtaatctcttccccattcaccttcgtcggagtcacatcgagcaggacaaataacatgcgtcccggtcggttttcgtctaagttcttccacatatgcatacagcctcggttcacacctaattgggtcagccacaaaatactattggaatttatcgaaagcgtaagcaaagacttactcatatcaccaggcaacatcaacttcttctcgccactgtcaagtgtgagctcaaaagctccctccaccacgatgccgtaatcaattgataaggcacggtgaatgggcgattccacgcctgggccaaagtcaatcaaacgaacaacacttccgtttgagacatgaatggggggctaagagggacaaagccaagtgttagcagacgcgatccataatcagacaaataggttgatttgcccagcaaaccttcgtacctcattgtcgcgtgcataaaccaggtcattatcatcattcatgtccactggattcccagaggtgctgtaaatgatgtttgcgaccgccagcccatccaccatgatccggtggtggtctccatcatcgtcaacagcaaatacgcctttgccttccttgttgtgggttgtaatgaacctgcgcgcatggcgaaggccttcggccggaaacttggtaataggtcccttaggagcggacatggcaattttcccaaagtaaagtagtaagatatcttgtctttcgttatgaaaggttagagataattgccacgaaaaagaaatatcttctctatgtataacaaacctgagagcgtctctgctcatgggaattgtcggaacaccgacgtatatcgaataccatacgccctcctgtcttcaaatcaccggtaattatcaatataggaagtctattactagcgcagatatcggaaaactcgggcaagttatcaaaccccgtgacgaattggccctttccgagtcatcattagcaggagcttcgggaatacctaggtgcgagatcgggaattcagaaggtgtggcattttgaaaaaatataccgaatgccaacctacagaatcaagcaatctagtaattccaggatatacatgattaggaggggttcatcatcatcatatactaaaaaaaggacttcaagttaaaaatctggatcaagtacattacattatggtacaggactgaggagtagaccaattccaggtcgcttctgctctaaaatttccatcagttcttcccatagcttctccatcgccaatatgccttcttgacttcttacgaatggagacaatgctgatctgatgataaaaggcatgggtcagccacggcttgaaaattgtatgaagagagatattctcggaagggttcatactcatcaatatggccgtcatttaggtactttccatgacttttgtccccttgcgcaatagctgcgaccaatgtgcgacctccaacttctgtcgtccgagcggtggccttgctcagaagccagagcgcgaaccctgtgatcccgtgcacattctcgatgagaccagaagtgcagtagccaggtgtgaatgaattgacaattatattgctggtgccgttaggagggtttgaatcaagttgttttgccatcgccctcgcaagtagtatctccaacaatttggagatgggatacctgagaatgttacatcagttcttttcggccttgtttgcaatgtgtaaaagacaatagattgaactcacctttcatgcatcctggcttgctgtcgatcattcaaaacttggaaggtgttttgtgttttccactctgggagatcatacattacgtgcctgtcggatgccacgaaactgatgcagggctgaatcacccatgttttggatgagcgtctgagtgctggaagaagcagtatagccagcaaaaacgtattaatcacgttcacggtcaacgtgctttcatgattgtcggcccaaacaaagtcatgggtgtagatacctgcatttagcagaacggcgtctattcgacacatttccattcgggtagcaaattcctgcactgactcttgattggccatatccagttcctcgacttggatgactccagatcgccccgtcaactgttcgagtgtatccgcggctatctggcctttctcagctgaccgtgcagctaatatgagtcgactcacattcaatctcaacaaatgacgggcagcctcaaaaccgatgcccctgttagatccagtgatgataacagtttggccttggaagtcatgcgtgggaactggcggctcgacgaagagctgagagtagaggaacgaaagcgccgacatacttgcggtggagatttctggcagcgtagaaggtgatttacccaagtcatcggggaaattagtcgacagggttgtaatcccagtggcataaacatagagatccccgcttccccgagtgatcctaacaggtcggtcattacgcatttgccgagacgcaagagagaagggaaaacttggatctattcccgttctggtctgtcaatgtgcccatatccttctgtaatttgtgatttgaagccgcgtttggaggggcccaccacatggtgcagtagaatctacacagctataatgagtgatatcactgctgctttcgcatgttttagccatcaagtgtaaacatggcagcaattttattcttgggacctttagttctcatcctagccgtatggctatcgagctgggtcttttcgccaaaacagcgcttgcctcccggtaggagaaaatttgggctcaacctatactttgaactcttcattaagatcatcttgcaggacctcagacactccctttcattggaaatattcaccaatttcccagggcgggtatccacttgcggtacttaggactgctcaaccctcactttcttgcattgtcgctaatgagaactcccacagattcaccgactgggcgaagcaatatggtcccgtctttccactcaggattggttcgcatggtctcatggtggttttgacttctgcgtaccatgcaacacatctcctagataagcgctcagccaactcgagcaatcggccgccatcctttgtgctgggcgacctggtctttgctggtgaccatcctatgtttatggatgcgaacgagcggtggaaactcagacgaaagctttactttcagctaatgaatgaggcgcggtgtaacacggagcatatacgtctcgtcgaggcagaagccacacatttgctacgcgacttgtgcctcgagccggattcgtttatgcagcatcctgctagatacagcaacagcattatcatgagtttgggtaagtgtaattctcatggaacaagatcagctgctaatttcggatgatgttagtgtttggcattcgcacacctcactactctagcccccactgcattgagctgcaacgcatagtaacagaattgagcaatttgggcgagattggtgccagcccaccggtagattggctgccgtttctcaaatatctcccggagcgactctggggtgattggaagacacgagccgctcgacttcgtcaacgagtcctgaacctccattcccctcttgtggatcgggtactggaacgccgcaagaatattggtactgctgcgactttccttgatggagttcttgatcggcaggagaagctgcaactcaccagagaagaaatagatatcatgtgtggcaacttactcgaaggtgggacagacaccatggctacgacaatactcaccttctttcaagccatggtcacgtaccctgaagttcaggccagagctcaaaagcagatcgatagtgttctcaccgatggagagtgtccatcctggagtgactatgatcggctaccctatgtggcgatgattgtcaaggaagtcttgcgttggcgacctccagctccaggatcattcccccatactctagctcaaggtatgctgaaacttaccctatgatcgagaatgaaacagagcaatacgctcatatgttgatatagatgacgaatttgaagggatgaaattcctcaaggggacatccgtggtgctcaacgtctggggtattcacaatgatgagtcccgctacccaagccccgagactttcgaaccgtctcgatttgccgagcaaacccgactcgcttcagtttatgccaatgctggtgatgcacaaaagcgtgatcattttggctatggagcaggtcgacggatctgtcctggcattcatttggctgaacgcgcgcttttcatagctatggctaagcttctatggggatttactgttcaacagaagttggatggttccggcaatcctattcctgttgatgtcaacccggccacagcataccgcgatgggttcttaaatcagtgtctgcctttcgatattgacatcaagccccgactggggagacaagagatgatcatggtcgccgcggcaaatgcagaaaatgatgttctcggcgcctatgaatagtcttaaactagttaaaccacgaatttgaaggagacgacagttcacccaccctacatgccattttttttacccaaccggtggcctacccaaatcacgtgactggtagcctatcttatcttcactggttgggtcaacttctgtaatttggtttttaaacctcaccaataccttaacaataccagctttccaccaatcatttctcgtcaatacctccacttgaggcgaatcagggagggataacaccttaataagaccgtaatagtatgttattctatacattcatagaacatatagtatgtctgttgtataataacacctcaataagaccttgatgtaattagtcaactaggcccccagtaactgactagtaatgatttaattaatgtgcgcaatctcaagaccattaaataatcactgataagctcacccaaacggtggatatctcacgtgatttgggtgggccaccggttgggtgaactgccccggtcgcgatgcaccttcgttgtatagcttctataaaactctgagactaacgatataccgttgagaacagcattttatcaacctaaagatgtggaattgctagtaatgtacccggctcagagagatacatgatcatttcaacaagtttgcacttgcagcgttgttccaccgtctacaacccaaccgacaccagttacatagctcgatctggggctagtcataaataagaccacgtctgcaatctcttccggctcggcaatacgtgacatgggaataattgttcgcatcatctcagggagatccgggtttccattaatggctgcagtcaccataggtgtattgacccagcctgggcaaatcgcattgacacgtatctcatgcggtgctagatcgagggctgcaaagcaagaaaatataagcctggattttggagtttattcgaattccgacataccggcactcttggtcaaccccataacagcatgcttcgtcgtcgtatatgggacaatatctggcgtcgcgatatacgaattgcatgatcccacgttcaaaatgacgcctcggccaacttggcgtgatttcccctgtttgttcaaggtgctgacactctgtgatttcataaccttggtcacggacttgatacagttgagtgttcccaacacgttgacctgccagaaggcgttcatctcagaaacctccgccttatcgacgggcttgtgatgtttgaccccgatcccagcgctgttcacactataatcaatgcggtcaaatgcctgaactgctgccgtgaccatatggtcgacacttttctcgtcggtcacatcaacagccacgggaagtgcccggtaggtggggctagtagctattgactcactctctcgtgccgtctggagtgcagcctcgaggttcaaatcggctataaccacaccccgggcgccttcggcggcataggcgagggcgactgctttaccgataccactgcctagaaacgtcagaaccggtactacgaaagcctccgaacagcatcctaccagcaccagtcaccactgcaaccccattgagttgtagggccatgtttatttcgctgcgatcaaactttgaaaacggctcgagtgaacgaataccttgacgcctggaacatggatgaatctcttgttttattattgttcttcatcgacaaagtaataaagtgtacaaggaacactgattgtcaaccttggcgatcgctctgcgtggatcgattgaatcgccgacgtccccgacgttcccgacatccccgagatgagattgggattagatcacagaagtttcccgatcacggatgcccctgcattaagtccggtggaattaaacatcagtttcgctttcttatgtccgatcggtagttgttgcaggcggaacgagcgtgaccagcaatggggccaagaactacgcattgaatgaaacgggctctttggcagacttcgcaacattttgcataatccaagatttatttatactacgtatcaagcagtcttgtagaacggtcgaaaattatatctagttttcatcgcagacgtagtctatgagcaattttgttgggcggttttcagctgaacgtgtaatgatctccagatattcgtagatggggaaatcactatggatcccagtttcatataggtcccattctcactctccgatatgaatttaacagaaccttgatgtgtgccttgccactcacctttcagctttcggggcgcccctttttaacgcagtaagatcgtctttctgactgcatagttcatagcctaagaataccaagagatctaagtgcatattgcgtaaaagccaagttagccagcagagcattttaggaacaggcaaccatttggtcgatctctgaatcacaagtttcctcttcctttgcttcctcttggtatggaatgtacttcagcgccattcacttactctacaccagggggcagtgcgctagcgcggcttacatctcctgttgtacgtacctctaaggctgaatcacactacattttgttggatttgggggccaatctaccagtctgagcctcgttctgtcgatgtggaaatgaatttcccatgttcccgatctccgtcggtaacttacagggcaaaaaataacatctggatttttatataaaggttgataattgttcacttgaacaagtccaggttcttccatatcacccatctcactgtatactcaacaggatggtgcaaatatcgaatgtttggggctttggtctcgccattatggcgtctctggcagctgctgcaccaaaagactgtccagacggactctgcctgagaacacgggtcaatctcagtccactagaagtcagtcaagaacttggtccgctgatttccaacgcctcaagtatcttcggacctagcgattcacgttgggcaaatgccacggcgagatatcaacagtatgccgcgcccaaatttacagtggtggtgcaggttgctcgcgaatctgacgtttcagtcattgtacgtctccttttccggaccctcaaatccaaatctaacgcccgagaagatcaaatatgccaatcgcaacagtcttccattctacgcagttaatcggggccatggtcttcctatttcccaggccaaattcagtggcttggagatcgatatgcaacttcttactggaattaccatacagtctaacggaaagtccgctcttttccaaggaggaacgtacgatcaacaagtcatgaacacgctatgggaggaaggctacgttacaagtaagtaaaactcgaacaaaaaacacccctactcaaatcaaccaagggaatacctaacattgaatctggaactcagctactggtagttgcggttgcgtgggaatgcttggcccagctctaggtggcggacatggacgtcagcaaggcttccatggcttgattagcgacaacattctcaagctcaatgttgtgttggctgatggaacaactgcgactgtttctaacacctctcatacggatctcttctgggcaatgaagggtgcgggccataattttggagtggtgacaagctttgaaatgagcatctacccaaccgaagttcattcatggtattacaagaattatgtcttcacgcaggacaaattagaggacctcttcgaacagctaaatgtattgcagggcaatggaacccagccagtgaagatggccgctcaatatggcatttacatgatggactctactgtcagtgccaccgaggttagtattttccgatagatatccgagtgaagttttgctgataatttaatcacaaaacaaacaggcaatcatctggtggacttttggctacgccggctcgcaaagcgaggcacaacagtacctgacgccgtttgatgacctcaatccactcagttctactgacggaaatgttccattccctgaagttcccaacgtccaggggactgggatcaacaatgccacttgtgataagggtcttgaacggatagtcggtcccgctgggcttcaggtgtataacgccacagcgcaacgccagatctacgatcttttcaacaaaaacatcaagtcctacccagaactcgccgcttcagctgttgtgatggagggctactctgtggaggcggttcgaaaagtggactcggattcatccgcctatcctatgcgagatgattacttgctcatgtaagtctcagcctttgtccgggtggtttgacaattgcaagcgaaaggaaatatactaatagttctttgtttccataggcaaactaccgtctcctattccccaaattcgacactcgataatgttgccatagattgggttaccgagaaccaaaagttttggaacgagggccagccaacacgaaagcccactgcgtacgtcaattacgcatctggcagagaatcattagaagccatgtatggatatgaaccttggcgtttggagaggcttcggaaactcaaggccaagtatgatcctgagggccgattttcctactacaacccaatcgtctgataaaccaactgttcgtggatgacacgcgcacagtgcaaatttgtctccatccagcctttgatctgttatattgatacaaatcaggggggggctgagatttttccctttctctcgttctcaatacaatgttctatcttgttttaatcatttcagataagctcttcctcatagccctgccgtggtcgcgaaattagaaggcaataaatattgttctactatttagttcaacagttctagacataaatgaaacaaagagattggctttgaggtatcgtaaaaatgctggcaagactgacaagaccaactggcaaactttcatcaaccagtcgctctaccgatgcagtcatcaaggctatagccattgaaactatgatgcgagccaggactctacgcagatcaaccagaaactaaagctagagagagaagaagaagaagggaagagagatagagacgcccaagccccacctctagaaacaatcagccaatcagatccttagcaaacaatatgatgctacagttcgtaatgatgcaaacaaggcaaacaactagcaaacatcacatattgtgacgacctccctggtttacatttcttctgcactctccacgtatatcgttacatctttccatgatctactgcgtcgagtatatctcctggaaaaaaaaatttttatcgaagctaacctatataattagtaagatacttaattgtgccacagtatgatgaggaagacccttcagcactcaggggtagttgagaaatgataggaaatcaattatgaccatattaacatagaactaatgattcttcgtctgctctgcctatcaatgactatcgctccgtcttcgggtggaccgggtggtgtgtactttatgcttcagaaagcgggcgggatcaaatgcctccgggccaatataggacgtaacgtccaagtggctcttcttgaacagacaactaacgtatgtctgcataccctttccatcttctagtttgcgatgctcggtgagatctgcaagcatgtccaggtatctctggctatattcaccccttccgcgagatgtcatccagtcagcgatgccttttgcaagagcaccatcgtccggtccatagcgacgaacaggagtataaaatttgatatccggcactgttgctccaggagcaatatcgaaatagtataaatacccagaaagcaaaagatcaatctcaacgaagttatctttagcggctgggttgtactctgatatgcaagggacctcagaatcctcagggaagtccgagtctaggcctgtaacagctgcaatgagactgcggagctcctggagctgcgattcagggacggggatgcgccctcccattgtcatgacctgccgcacagaggcaaagctggtatggggagattggaagtagaacttgagcctcgatttttcagggacgacattatcaacagccagcatgctaagaattctcgttagcaatattccaaacgaggaagcatctattattgagatgcaaagataaaggcttacaaggggctcagcaattttccttccgggtcattgttgaggaattcgtgcattgcggctcgagattcactgttcggatcaagctgcttgagtgattcttcccacagagcgatgggcaacttcccatccgattgacccagacgacggggaacaaaatacgttttgagattcagaccattcttgagccactccgcggcgactaccaccgtagtggtgaagtgcgcacctgccgccgcttccttggcatatttggagcggtcatgatcgtagagggtggcgaagaaatggttggtccaggtaaggtccacagttggcacgaaatctgctatgcgatgcagcatctcaagtgtggcttgctggttcagaggatccaaaagggttcctgtgaaggagccaattgcctctgtggtgtagcggacatcgggcttgcctgccgcagtattccatttccaagaatattcaatcggagacccttcaactcccagcaaagatttccatttgaggttgccgtctggtccaggtgcggggcccatgtagggaacctatgctagccactccgttagtgttgctgcgtttctagtgaaacatggagaggaagagtgggggaaaaggaacagggatgcgcacgatccaatgatagtggaagagaagtgccacatattgctggtctgttgagtatccagcagcctcgaccatgttagacagatgctggcctgtcagtctccaccaataatctgcatcaggccctcgtgagggcagccatggtgatagagttgcccatgccttggtgggtggtcttgtcacttcagccatgattcgattcaaacaaatgccaattcaatgattgatgagattagcaaagtagtaattatggagtttaatgagaagggatgtattccaaatatatccatcgtggagatatgttgttatcctttcgggcttcatggacctcgccctggctgcaacgaggtagattggtacatcgaaaaccacagcagcgaaccacctaggcaatgtttcgggaaatcgggaatctagccctcaactcgtcgggtatatataaccggggttaccacccgtagccgtggacgacttcgggcactaacttgccagcttgcagggatcatgacttggaaattgtaaatccgattaagtccgaagtgggatacatcctaaactccgttaagaccatttctttccttatgatatagtataattgcttcgtttcgctccgcaattaattgaccatccattgtcttcccaccaacatcgacattacaacatctttcatcccttcaaatacaaactttcctacaatggccgccgtcactaaacccttggttctgatcaccggtgcaaaccagggcctgggattcgcgacagcacaacagcttgctagcactggccaatataatcttcttgttgccgcccgctcccaggaaaaagccgaaggcgcagtcaagcaactggagtctagcaccaatagctctttgacgcctattgttatcgatcttgaccaagacgaatctatcactgcggcagccaagttcgttgaagagcgtttcggatcgctggatatcctcatcaacaacgctggtatcaatagatcgtccgacccaaatgctactctgcgcgagagctaccgagctgtgtttgaaacaaatgttttcggtgtggcggtgatgacagcaactttcctaccactcctacgcgcatcgaagtaccatgaccgacgtattgtcaatgtgacaagcggccttggtcaaattggcatcgcgtactcgccaacttcagaatacagtgctaagatatgggaactgcctatctaccgcagtagcaagtctgcgatcaatatgattagtgctgtcgatgctgtcagtctcgagaaagagaacattctcgttattctagctgccccaggcttctgtcgtaccaactttggaggtggtcagggagtcaaatcagcagaggagggggctcggcctattgtacgggctgctacagagggttcgccaaaagaactatttggaaagcttgtggacgacgagaacacgctggtcgagttcggctggtagattgaactgttatgaggattgggagtgacgagactagcaatatatttatgagatgttggcaggaatttgttgagataggtgtgtggggctgcctggttactcaggtcatctacaaaccgccgctcgtttacacgcagatctcgagatacttttcggactttgtcttttacagaatgaaaacccctttactctctctgatattgtgtttctgtgtcattcctcgagcaaatgatacctctcgttaaactataccagtacctctcaggtgagaggatggagaattcgccacctccgttgcccttttcgcgagatgagcagtttatgttcggtagtaatgaatcatgaaacggccgtgaatatccaaactgtgtgtaaaattctattgatgtaaccaaaaatttcggaaaatatacaaagtgaaagtgatgaagcagtaacgtgggactcaatgacctgggcgtcagttttccatgggattttcccactcgagattcgaacaaattgctttgagatccttcaaaagttcagagctattcaaatccaagcactccacaaagttattcggaaagcaatcgttagggccaattgccgagtgcccgatgccttcgtgtagtaatcaccgggttcccgaattgagaggagaatctcgtgacaattcaaatcattatactcttaccttgatgctagtcctagatagagtattggtctggcaaaacttgccctgtaaaagttttccaactcttgaacagccagttcgggcccttcttgccaataccttgccctccgcacatattcgccatgttgcactctcctcctccctttgctgatgggcttcgccccctcaaagtcatcattataggaggtgggattgctggtctatctttggcgaatgcctttgaaaaagcccctgtcccgatcgaatacgtaattctggaagctcgagacaccattgcaccacaggtcggagctggtattgctcttgccccaagcgggtgtcgaattctcgaccaattgggtgtgtatgacgatttggaacagctggttcatccggtgcaaagcagcggtgtgtgtgatggacagggaaagtcgttattgcccgagcggagtgacaccgcattgctcgtcactgcgcgcatgtcatatccgttgggatgggtcgagcgtcgaagtgtcttgcaagtgctgtttaagcacatctgtcacaagaaaagtgtgttgacgagcaagaggatggatcggatcgaacactcccgtgagcaagagaagcctatcaaggtcatctgcaccgatggctctttctatgaaggcgatctggtcgtgggagccgatggagttcacagtaaaacgcgctcggagatgtggagggcggttgagcaaaatatctgtgatgattttgatgtgcagcaggaacgtcgaggtaagtggccctgaatcgtcgaaattattacccatcaatttgtacggatgtactaacagggataacagccatgatggctgaatatcagtgcatgtttggtatctctagccccattccggggttggacgctggtatgaccgacgacacgcttgcaagagacgtgtctatggtagtggctagtggcaaggacggcaagattttttggtttttgttcaaacgtatgccacaagtataccaaagccatgagattccgcgattcgatagcgcggatgcgttaaaatttgcagagcaatattttgatttccctgtccagtccggtgcgagcaacattaagttttctgatctgtgggagcggcgcgagacggcaacactagtccctctcgaggaggcagacttcgcgcattggacagctggtcgcattgtttgcttgggcgacagtgctcacaaaatgacaccccatactgggaccggaggcatgcttgctctcgaacatgcagcagtgttggccaacataatatgccggttggtggcccagggaaacaaattaccgctcacaacatctcaaatcggaatggccctgagtcaatacgatgaaaaaagacgacaccgtcgcacctccgctaaaataaagtctaccggagcgtctgctcgcatgcagactttacagagtcttgcggatcggcttgttgttcgtttccttttaccttacgctggtgatattcgtgccgatcaattttgcgatgatgccattggcgcagagcatattgaatacatgccagttccagcgcgctctatgacgggtttgatgccttttaatcccaatcgtggtatcggtatgcatgaaagcatatggccacgcgtgttgtgggccttgccactacttgggatggcagttgctgggttgttgactatgttctccgtggcgccatttgaagatgcatacgacttccttgctcgtcgtcgctaccgcgaagtggaactccgagacaaattctaccactctggtttgctcgatgatttctccaggtcgggagtcctgcgcttcatagtcagtgaagcgcacttcttttatcagcctttctccttttttgccgactatggtgtttggtatggtatcatgttggttgagtctgcaaggagagctaaccgactcaacgtcctaagtttgtaagtttgcgacagagtgaccaacactctggatgagaccttctaacatactatttcaccagtgctcttctctggggaatgctcaatatgtggggaatcgccattttcgttcccatttattactttgcttactacatcctcacgccaatttccacctttgacgcatccgacaggcgtctaacaaatctttcctatacaaagactatcctgccagtgcttttggctacccactatgccacttttatggacgcttatctttctccggtgcggtcccaccgtcaggctgctggcttcttgtgggagctattccctgtctggctctctcttgcacaggcgggccttgctcgaaaattcctccaaccgagcacgctgaagcaagatcgactcaataatgttacacgcgatctaccgactatccgaacaaccattctcgggctttgtgccgtttcgactgcagtttggcagtatacagtctggtgcagcgagcactcgcttggaaacatcttcatacccatccgtagtagtgtgcagggccaaacttttgaacagctctttgccgagttcttgaaatgggatcaagtattcttcgctattccgaatttgttttggattatactattgtttgctgatcttcgtgccgctggcttgattcatgctggttggctcaaaatatcattctcggctctgggtctgataattgcgggtgggaatgggacgatgctaggattgatgtggctgtatagggaagaggttctggcaaagagacaagatcgaggcgctgttgtgcgtcccatagcctgacctatggtgaatgcagtgtagagtttgacagcggagtgttaggagaaatgacaagacagaacttagcaggcgttgtcaatgctatccgaagaaataagctgcataagctcattatccttcgcaattagcaacatatccccagtctgtttactaatccagcgataaaagtgaaactagtatgccttatgtcggtattggtgataatgcgcggtgcgccagaatctgcgatgagacctgccacaatagggccgaacccgcatgcgtatgtgttcgggtagccacataaacacaagacctgatgcacagagtcgactgagagaagggccaaggtagacgatgtgaatcgtatattgactcatcatcgatgccaccagtagtctgtcgaagtaatagacagcatgcgatcgcatcggtacagggaagctagagcatacaagatatttgtccgcttcgcattcgactcgagtgacaggaatacgaggggcgtcctgttgtacgatccgagccagcaaggcttgaaccagttggagatgttatagcttacttattcgtaaattttacaaggcgtgcacttgagacgaggcgataattagcttcgtgatcatctcttactgacgagatcatacacttgttttcatcaatgcaaagtcaccattcatgttgtacccagctcgttgcaacctccagttgccgctttcgaggaagctacgctgtagcgcaccgcgcattttctcgcgcggcatagggcgtgatgactcaccaggcacaagcaattgaataactagctgtaatagatgaatgtttcgtgatgcgaacggccagaggctccgccattcatggggtgaagacggcgaggacgaacacgcgatggagaacgcgtcgtgacatcctttgatcttatcttattttggtaagaatgatggtattaacctctggatggtatgagatctcgaaagcgatttggctaggattaccctgtcacgttcatatcccgctttctctgtccaaggcttgacaatatgacgcgcaatcaaatgagaatcgaattgcttcaagcagaagtcgacgaaaacgatcagagtttctttcgtctcctggtcaacgatcggaacataaaatatgtcactatagaccctggtctctatagtgttgacgatatgtatttcggcccctcgctggtttcacttctacccacccgctggagattggaacgatggactggtgaccaaaaacgaagcgaatggccaaccccactttgcccgtgctattcggtcccttttccctgtcgtttaaaacacctggaatgaaacttttgttgatcatacggagatcccggtcggagaaaagttacgaacgggcgtttgtgaagtcagatgcaatttgttcgacgtggttgtggcaacattcgcccgctttgactaggagatccaatatctagagagtgagaccacggcttaccaatgaattgagggctatgatatcggcccacgattccttggccatttgacggaagatggccgcgtgcttcggattcttgatggaacgcatcaaggatgctagacatgctggccctcgggacctcgagacctgtcagaaggcattgtctcgattacatcgcctagggatccaccatggagatacaaaccgattcaactttcttattcgtggttcgcaggctgttttaatcgattttgactcggcacgaaagtgtggcgaccaagatgcgcttctgaaagagctcgaacatttaccgaattccctaaaggatttatcacgtcgaggtgggggagggctcctttgaatagtcagtccttcgaatgcatgcctctggtttttttgcgtcgtctttgatgccagtctggtttcagacaggatcgggttgaaattcacatacttgtacgaaaaggcgcttttttgcatcgaagatccctctaggggcggggcagtgtatcagcgaaatcggctgttatggtggagagggatgttcgtcaagaaggtaaactttacctgaccaatccaagtcctatctttttgatcgactagcagggtggcacggcagaccttgctggtaataaatctctcggtcaacgatttattattcaagctggaatttgaatgatcttcccaaagtcggttatttcaagtaaatttcatagttcttcgatcaaacgcgccattctcgctctattagctaagcattcttcaatcacagcatttcatacttagagataggttatctccaggtaaatgtttgtctacttatgtagcatagaccgaatataagatctatgcagttcggagactggttcccggcagaagccctctcatccaccgcggttatcgggccaaacatggagaacttctcagaaaattcggagatgacccttatagaataaggaataaccgagaaatatgtatattgaattcttcagaggcagtcggtgtttctttggccccccgcgctcggagttgtggccgagatccaaatccaaggcttccccggatcttcagctttattagcaacgtgctgcccctcttctctgttcgatcagataccgggaaaacatcctttttactagtcaacattttataatatcagagaactcagctatgtatggagttgccccacacaaacattcaaatggtctttttactcacatactacaagggcttatacagcatcgtttgctttcttcgaagccctctgggaggtatgtatatgtacaatagcatctttatacaccaaagcgtccattctaacctctacaaccttagggtggcgtcagccatgtctttgtcaatttgggatcagaccacccctccatcctcgaggcgatggtgaaaggccagaaggaaaagaaaggccaattccctactataatcacctgtcccaatgaggtacgttagcaattgcattatgggacccaccaagcctaacggcagcacttcggttagagtcggtatgaatgtgagccccgctgacgatatgctgtttagatggtggcactgtccatggccgacggctacgcacgattgaccggagagccgcaagcagtaatcgtccatgtcgatgtcggtacgcagggactcggagcagcagttcacaacgcctcatgcgggcgcgccccggttttgatatttgccggtctatcgccttacacgatcgagggcgagatgcgaggttcacgcactgaatatatccactggatccaagatgtgccagaccagaagcaaattgtcgcccagtactgtcggtacacgggtgagatcaagtcgggcaagaatgttaagcagattgtcaaccgggctttgcaattcgcaactagtgatccacaggggcctgtgtatcttgccggggcgcgggaggttatggaggaggatatcgagccataccagctgaaccaggctgtctggggtcctgtgtcaccggccgccctaccaacctccggcgttgagttaatcgcagctgagcttgcagctgccaagcgccctcttatcattactggatattccggaaggaaagcccaagctgtgactgagctggtcgcattggcagatagcttcaagggaatccgtgtgctggacactggtggtagcgacatgtgcttccctgctaaccaccctgcatggttgggattgagatatccaggccatgaggcagtgggaacatctgatctaatcctggtggtagactgcgatgtcccctgggtgcctacccagttcaagccgtctgcgtcggccaagattatacacattgatgtcgaccctctgaagcaacagattccagttttctacattcactcgatggctacattccgcgccgacgcttccaccgcactcaagcaaatcaacgattacgttgcttctcgggaatctctgcaacaattcattagctccaaagataatattactatgggccagcgccgagacgaggagtattcaaggcgtcgacaagagatctccgatctggctgttatcccggagggcggcgacggggcttccttgaatatccactacctcatggcgcaggtccgcgagggcgttccgattgataccatctgggctattgagtccgtgaccatgacccactttgttgctgatcaggtctcagctacccaacctaagtcgtggatcaactgtggaggtggcggtctcggctggtccggcggtggtgcgcttggtatcaagcttgctagtgacatacagcagggaggacgtggaaagggaaagtttgtctgtcaggttgttggtgatggaacattcctcttctcggtgcctggatctgtgtactggatcgcccgccgctatggaatccccgttttgacaattgtgctaaacaataagggctggaatgccccccggcgaagcatgctgctcgttcatcctgaaggggacggctctcgtgctacgaacgaagacctcaatatctcctttgtgccaacgccggattacgccggtatagccaaggccgctgcaggcggtgacttgtgggctgggcgtgcctcgactgttgctgagctcgcccggaagctcccagaagctatccagagtgttctaaacggaaaggcagcggtgctggaagcacagcttgacgggaccgcaggaaaatatgtagaaagctcgtgagaaatggaatttggagggcatgaggtacttttagagtactagcggtccatagactgttcaatgagagttacaattcatggagtaaaaaaagcgagatttcaagagatgtatattttgtatgcaaaacacatgcaaaagatacctcgtgaaaaaagcatcggtaccccacgcccttcgacatgctagtgcctccaattgatagaaatacactatctgtccaagctattgaccccaacgtcaaataggaagcttatcaaaagtgggctgtactccgttgcaccgtaaatgagtcatctggttcggagaacgctggagagatagatttccactccgctttcgccgagtcgcccttcgcagcaccttcgattgctcctgtttcgtttttcttcttaaatagtccactgtcctttcacacaatcaggccaatactattacgtcctacgaattcgatatacaatataccccgatataccaaacacccctccgtataaccccgcgcatacccctccgaattccgcatttcgcattcacaccgccaccaactcaattgctcaatcacaatgagtccaccggcacctcttgatgtcgacctggtgggcgtcaccgatacctcggctgtccctgtcccagatcccttaaccatcaatggcgtgtcagcatggcgacagaagatggccaaggtccccaccggcgtggccgcgccatccaacagtgacatgttcaagagtccggtatgataactctagattgtgcataggcctcatggagatatgaccaaggaaggcaatcaattgcaggatacagaatgctgatatgtgtctgaggcattagatttgctacacaaagcctaaggccaagcggtttgagcgtatgtctacctttgccctttgcgtgtggttttcgcaattattcccctgatactaatcattcgtttgcagactgtttttcgaccgaagccaagtctcgcaaggttcgcacccaatcgcgcaatgcgaagtccacacttgctaatccttccacaccttaggcgtctactttgaagactgctgctcgttacctgaacaacccaggtaatactcccggatacttctctttcggttcattgattaattctgtgttcaaggccttatttcgctcggtggtggactgccctcgcccgaatacttccccattgaacatttggatattaaggtcccgactgtccccggattctctccggaggctactcgggagtcaggcacggttcttcgtgctggaaagcaggacattaaagatggaactagcctttacggtgagtccccgttctttatgtgcattagaaatggccatgactgatccaattccttagacttggagattgcccttaactatggacaagctaccggagctgcgccattgcttcgttttgtcacggagcacaccgaagtgagtataaaacaccatatctgtcgtctgtcagcagatactaattaaattagatcatccacagccctccctactctgactggcaatgcaccctgactgctggcagcacctacgcctgggacactgctcttcgcttgttctgtgagcgcggagactatatcatcatggaggaatatactttcgccagtgccgccgagactgccttcccccttggtatcaaggccgtgggcatcccaatggacgggcaaggcctcatcccggaggaaatggacaaaatcctcagcaactgggatgtcgccgcccgaggtgcacgcaagcctcacgtgctatacaccatcccaacaggccagaacccgactggtgccactcagtctgcagaacgccgccgcggcgtgtacaaggtcgctcagaagcacgatctcatcatcgtcgaggacgaaccctactacttcctgcagatgcagccctataccagcggggatgccactccagtgcctcccccctccacccacgaggaattcatcaagtcacttgtcccctcgttcctgagcatggacactgatggccgtgtcgttcgcctcgagtctttctcgaaggttatctcgcctggttcccgagttggctggatcgtcgcctctgagcagatcatcgagcgcttcctccgtaacttcgaggtttcctcgcagaaccctagcggtatttcccagatcgcgctcttcaaacttctcgatgagcactggggccactccggctttttggattggctgatcaacctgcgcatgtcgtacactgctcgtcgcgactcgctcgttcacgcctgcgagaagcacctgccccgcgaaatcgctcactgggaagcccctgcggctggcatgttcgtaagtattccctgtctattccactcacatgtcattcagcaatgaatactaatatctaccagcactggatggaaatcgactggcgcaagcaccccggcgttgccgctggcaagactcacgccgaaatcgaagaagagatcttcttgtccgctgtgaacgacggcgtccttctttcccgcggcagctggttcaaacccgaccacgacactgccgaggagaagatgttcttccgcgcgaccttcgcagctgcttcgtcggacaggattgacgaggctatctctcgcttcggccaggctctgcgcactcaatttggcctgtaaattggttcctgacctacgattttgacgaatctcttttatcataaagaggatgcattaacttgttagttttgtgattttagatggtagatatcgcagttttataaagggcgggttttcattgtgttctagagaagcatattgcattctctctttttggttaacttttgacctaaatagtcaacaattctattgttttattcttctatcgggattcaatatcgagtcgaaagaaatataataatgcacaaaaagaataatggttggtatcaggcaataataaaacaaaaagtaacaataaaggatgagaaatatatccaaacgaatcaggagcattcaaggggatatcttcaaaagagaaaatgatcatgaccccagaatcttgccataagcatcctccacctccttagcaatctccaacagcgtgacaataatgatctggtgcgtcacattaggcagcttatcacgctgcagcccaatccactccaacggcggcgtagcctcacccatatcccgcagctgcggggtctcaataatcggcggctcaagcgcagtatatgtatacctggactggggcacattaacaaccgcagtgatcttctcctgctgctcagggctagtaccactcccttcaccactactagtgatgcgcaccgcagacggcggtaagggcttgccaagccgtgacgcgagcgcccgcgagtgcgtctcccacatatcgcgaatgaagctgatgcgcgagtaattccagccgacatcgactttgccctcgaacgtgctgcggaatatgtagtcgatctggtggcttcctggagcctgccaggtttccatgctcgcgactagtcgcggtactttgaggattgttccgccgcgagatactgcggctcgctcggaaatctcgtccaccgagagctcgtcgagttgcgcggatgtaggccgcgtaatgccagacagcgctacgcgaagctggcccaatgttaggcctagggcactgtggattttgttggcttcgagcgagacggagaagcgggcctcggcgtcgtgggcttctaccttgaagatttggttgtcgaagaatgagctggggaatgctcccaggttgacgtggcggatcttcacgaccactccggtgtgtagagagatgggtgctttttcgggcttgtcgtggtctttctttgcttgattcttggcgctgacatcgaggcgctcggtgaggacagaagacttccggcggaggtaccgctctacctcgcgtagtgatgctttgtaggctgcttggacgtcttggatcaggcgctgccacgcctggaatagcgccaatgtttgtgatgctgtcagagatgtgcagaatagctggagtttgtcgccttccagaatactgaagaggcgctggctctgcgcgccggatgtatttcggacattgtacatcaagaaattgaacatggcgatctgtgcaaccaagaaaggttggtaatcgaatgacaccttggcttggaggtgttggaaggcaattgtggcttgaatcaacggtgtgtgccctgcctcacaggactcgggccattcaatggaggtatgaatcctcagcgttctgagttcgacaattccactcatgcgacccttactctcgatggcaactgagccaaagtttatacacatgttctgttcgctgtcagatgtcttgctggtagacacccacagatcaataatggcgaactgtgccttgcctagggtcgagcccaaatcgagttggatttccaccttctcaatcgcgatggtagtggtccaggggaatgcggacgccgaagcaacctgctggtagcgctgcacgatatagctttgtgtttcggacggtcctggctggacgttctcactcgaggtggtttcattgtcggatggaagccaaatttccttgaagagcaaagagtcttgaacctgtttggcattgactgcgaccttcattggactgacgcgcaaaatagctgacattccgttcatccggccaaggtgcttgctgttcatcaatgacagcaccatggactttacctcgaagcttgcggttgattcattggagtacacgtgttttacagatgcttccaagctgttgaaagctaaagagagagcaaggaaccggccatggtcttccgagaggaccgtgttgacagtcacgtagacactctcaaaccttgcagtagctgcgactcttgcaataggctgacagcttaagctaaattcctgtttgtaaaatagcagtcccacgtttaccttgcaccgaccaaggatgctggttggatcggcggcatcaaatggcttttcctgcattggtttctgtgtctgaaatttcgctgctgcagatggctttcgaggctggccctgctggttgcccatgatctccttgactgtggcggtcatctgcttgacgagaggaacaagggttggatacaatgtatttgttgaggggtcgaccttcaactccgcattgagcgcaggatcgtcggtgccgttgtcctcgaattggactttgagcgccactcccggtgctcgcagagttgctgtggtcgctacatcgccttggacatattggccatattttgcgtcagagagtcggctacccttccatgtggccgctagcaatgtctggtgatcatggccaagttttccttgaagcgtgacaatagcgcctgcaaagtcaacatcgacgaggagagaccgcaatcgtctattaccgaaaaggctgcgatctttgttggtattggtgttttcgggtgagtctgctttggttgcccaaacagccttgccttcacgaagcgcctcgcttgctgtagacattgagtcttgtatcatactagccggaatgataaactccgatgtggcgcgtatgtcgagggatttgccagctgcttggaaagcaagacacacttccttccctttggaggcatacgccacgttgaagaccagctctggcataagggctgaattgagcgagcgcttttctctgtccgctccgaatggtaccatctgaagttgcatgttttcgattcgaagtttggctgcgttcttcttcttgttggacagttcgacttgttggattgaaaagaccaggttctcgggctgtcgaccagattttctgtggaccgtggtcatgttccaagcgatctgaatggctcggaattgtaaagagtaaagagcatttaggaatgtttccgggctggaatcatcgttgacgtggatttcaggggcagcggtggctccgtcttttgtgtcaatgtggccaccatgtcttaatctcctaagacgcttgacttcatgggaaaggtccagggttttgatgcgctcttgtgtatagacggcaatatcgaccacaagggctgctgtctcagcggaaagttcgacatcgaacctatcgctagtgaaatggtatgctctagtgatctctccattttggcggatcgctgatgttccctgaagcttcactccagcagagaaacctccgtatgattgactgctagccttttgttgttttcgaagctcaaatatgatctggggagcatcgatattgaactcgggatgctccatggcgtatccccgatcgagtccattttgaagtcgcatacgcatcatcccaaggctgaagatcatctccgcagagtagtctttgccctttaggcctggtgcaatggcatgaatctcgaatccagccattgtgagacgggatttgtagaggatctcctggctgtcagatgctggcttgggctttggggataccttctgtagagacagcacgtctttcaggtgtaactggagaacatctaaattctgcttgatatcacaaaccaaatgggaaacatccggtcctgtcaaaacagcgaggagactgcgcacagcactggcttctaggcgaatgagttcaatcgtgatatcaatctccacttccttgcgatccggtaagagattagcaaggattcgcccgtttacgggaggtatttccagtatggacagaacattgaacctgtggctttcacccgatacgaacatgtgcgagttcttcttcacatcaaagtcaatctcgattttggatgcctccgtgggcatcactgtcatgcgagcgacctcgccggacagaagatagctcaaagatggtaaaagggtaaaagtcaaccgatagtcttctaagaacattgccacatggaaggtgtcacgagtgggtttatttgatgcgaggctctgaccggtttccggatttggtaccttgacactatccataagctgtcggatgtatctgacttcgtccgcgatgagtctatctgctgtatgtgctaggctgacagggtcttctttcatgtcataacgaagctttctgcaggacccagctatcttccaatcgtgtctgcactcgttgtcatcttcctctgatgcaagcgaaaggtacacgtatgggtcggcgattcttgacaacatcagagtagtagattggctttgaagctctgacgagcatccttcagcgctaaacaatacagcgagatcttctggttctttggcaccaagcgccttgtgaacgatcgatcctcggagagccttcgctattagagcaagcttaacattgacacagtcgagagtgatggaaccaaaatcagtgccaaacattatctgcagctcgatcggtgtcttctcttggaccttgtcaattgggacatgacccggcgaggatgcaagtgtgatattcgacatgaccttgatcaccccttcagcgagatctagaatttcccagcgcagcctcagggctgttgatccacaataagactgcagggtgatgagttgcttgctccccccttcaccctcaggcgcgtgtggagcaaatgatgcaacagtggacaaattccctatgaccaaatcgctttctttcggaccaggatccatggaaaattggaatgtttgaattgtggaggatatgaacatcgaaggctcggaagtctgccgttcggcggcgtgcggccaaacacggcgcatgacatagcttttggcaacatgtgccaggtcccaagcccgccagcggtcgaagccggataatactgcctttttggcattcgccggcagaggaaaattctcacacaagcatttctgctccaactcacgcttctgatgagcagacagactttcataaatcttgcgaatgcgagatataatcttccacgagtcatgctgccgcaagtgagtcgaagcaaccctgaggacgtacgatatgcgagcaaggaatattggatccggtatatcagtagccgattgggtgagggagtacaggaggtactgtaaacgcttttcgctggacgttaaaatctgttgaaaggatgacgcgacagaatcaaacatagtcgttgctcgacgaacgagaaatgcaagacgctccacagactttgctgatgtcattgtattgaatgttcgcatctgaaggttagagcgaatattgggcgaggtcacaagccagaaattcatatcttccatgtgtgagttaaacacagctttctcatggaaagaatctgcgcgtctaccctcgatagaaattgaaacataatccgctgccgcatggaccgttacaccttgtttgagaccttcaagtaaatcacctttctgacgttgaacctttcttcggaactcagtatgcagacgacggatatctaagctgtattcatctcggaactcgacctgattgttgttgggagccgcagacaggtcaaccagtcgtaattgaatagatggaacataaagagagacagctgttgaaattctcggcttgctcatggcattgtcatagccaacgatggaagatatcacatccttttgaagcgagtcaatgattcgcgtaggatgctttggttccaacccatccagtaaagtagctagacttagaaggaattcgggtgtacaaaaccctcggatcccgagggggaggttgcacgcaaggtttatgtatttcgtttgatcgtcatcaaatgtgagaaacacggacttttgattcatgcttgagtcttcactcattgtgtcatcctcatccacaaatggcaatggaagttcggatgtatccagatgaagcttgtagtacgagaactgtggcattatccacggatttgtgtctctagtcgtagaatgcgaggatgcgcctacccgaggcccgtaatttggtccatctctcgaccggttggctttcgagacggacgcgctcgatcctcgggtaggcagaaaaggccgcgatttggaaatagatttcgaggctgctctggggctgttgacagtgtgtatccggacacttttcatacttgatgcttctgactggacaaaaaagctcttggcacttctagtggtacgaggacctgaagctccttgatatgatggtgcatcaacagagccaatcctgtcatgaataggctcaggcattgaaggtatggccatagttggagggaatacgtcgtcgtcagaaggaatggttgaagctggcccagtctcttcccagtcaaaaagcaaccactgtgccctgtgagtacgttgatcgtgggttctgatatgttcttgctgaagtcgtcgactttctgcaatatcggatttgcgtaaagccaacttcaccccaattgtgagctggaaaagtcctatgggagataacattttttcccccgccgatggattgcattgagagacagattggcgatcaacggcagcgattgagatatccggaacgagaagactcatgcgtttcgaaaatttggtgtttgcccaatcgttgaagttcacattcaaaggctgtgtgctcaaaatcacagctgtctggtctagtagcacggaaatatgaattgagtcaaccttggccctcaagaaagtcacgtcaaatagaagctccgggaaaagcatcggcaacgcattttcctcgttgtcaaaggagaaatcaaagctcttcaaagatgaagccaaacaggccaagaactcggtggagcattctccgacaattcgaccgacatcaaaatcccaattacaaacatatgttggttcaagcgggggcaaaccaaacagacgatggccgtaaaccgaaaccccatcgatgaacagctgagtgctagagatagtggaagggccatccagttcagtggtctccaaatcaattttcaccggggtgatggaaaattgcaaatccatatagtagttagtaaaacgcaaattcgcttcgagggaggctgcgctaagtcccatgcactttgagtgatcatagatattcacaggaagcaaggcacgggggctatcaaccgtgacgcgtacgagcacatccatgtcatttgactttcggtttgggttggtgcctgtcggatttgacggtggctcgtcggcatagactagctcttgatattcttcaagtgttctgaagtgcatttcctcgccaaaatagttttctctgattgtcatgaaactctcgaccaagaatccaaaaaggtaaagacgaggtaaagttccatcgacgttgagcatcagcgtgtcagtcagttccggagatgttgactggaaatagttataggagccgtcaatgaacaaattctctagagtggccatggatttttgcggtaaaaattcatgcaaagtatcccacaaaggagtcgtgtagtccacgccgccgtcttcaaggtttaccctgaagtcgatggcattttgttcaggttggtatttgtccaatggtatcatggcatttgccgccaggcgcttgcctttgataacaagaaatcggttgtcctctaaatcagaaggattgctgataatgtttcggtcgttgacgttgatgtaaagttggaagtcggagaaattgagatcgagattgtaaataaaaggcacaaatgagtagtagtccgaaggcggtcccgaagcccaatcgcttacaagatctgtgagaaggaatatgtgatcacgtaggagaaacagctgtaggtcgtggttttcggcagtaaatttccaggggcgaagaccattccaggaaagtgggttggatagatcacaagtaatctgttgccgaggacattgccaaagcaagccatggtttatgctggatgataatcttgactctcgcaagtcgatagaaagtccattggaaaaccctgtgctggatcccaccatatccatggtatagttgatggtagagtcggcgccaacacaaagggaaagccacccaaacgggcgaatttcagggccgaggtagcctttttcaccttctttagctcgagtcgtcttctgttcgtttggcttctttgttctcgatgcacccccaacggcatcagcacgacccttccattgccaatccttggaaggctctcgtgtcggaatacgcaatgtcaattccctattgatttcaatgcgcaatctaaatgccgtgctttgtcgcagagcacccggtgctagtttctctgtgggctcagcgttgcgatagaagtttggaaaaaagacattctgcaggccaacccgctccctatcagcccagggtccgtaatttatcgtaccgccgtgaatcttgaggtccatcccccattcgggagaaggagcataattgatattgctatccattgattgagactgagcagctgacggtggttgaataatgactcgtccagggacgtcccagaagtaggctatattcagcatggggctatccacgatggtagagaacctggcatattcgactgagttccacttctcgtggtcatccccactatcttcgtccagataccgagagagaccggtccagcggacctcaggaaactctgcctggctcctcggcatactgttggcgtgtctgccatcgtcgtggaacgattcgacagatgtctggaaatatgggaccaagtctcgaatactgtgccatactctgcgcctctgaaattggtagttgaagatattttgcggtcttttcttcgatgcgtggtctttctcttgctgcgcacctagatctttggcggtcgccgattggttctgcttgaagtccgggtttggccgcatttggaccactgcattttttacttgaaatgagaatatctgacgatacaaatcaagaggacctgaattggaagcgtcgatggtacccattccagtgtcgaacgtggttgtcaacacagatcgagtatgctcattcccgatgacaatggctcctttctggcaatccagcttcataggcaggagttgtaacatgttggacacaggatccgacagttctgatccacgaatagtagtcttttgcgacgcaactccgctcctctcactcgtgctgcgctgtgacaagggttcgatggttggccgatgtccaggcgtatctttaaaatcaaaggcgttgctttcgttgccgttttctgccgccccgcgagatcctgggggatttgaattgtcaccgtctaaatcaacatttttggaagagtatccaaacccagtaaggatactgtcataggcaggtgtccggttgtagatgaaccattcaaggccatatgtgttgatagtaatccggcacggcaagtcggtcgtctttcccatgccaccttgctcccccagattgtcgtccgttgcatcgcgcgggcacgcttcttcccttgaggtatgatgagcaagacctgtcttgcgtcgaatcccggccaaatcatttcgctcgactgtacgcgtccaatagcgccatgttatgaatcctccatgaataaagatggtctcgttcaccccatggtaccgaatgcccttgaagaagattcttccaccaagtagggagacttgaagtgcgtttatatcaacatatgcgcggtagtaatgccatgtgtatgatcgaatcgcgtaggatatgaggttcgcgaagagtcggttgaagtagagcaaaaagaacagagcgctataccgttgatcagcgtaatccagtcaagttggaatagggcaaacttacagaatgcaagagacaatcagttctaagagaaagaacctagatcgatcagtataacagccatggttcaagcagtccaagcagcgattccataccaattgaagcttggatccggcgtcaggaaggtcgatgtcaaacttgtactacccatctctctccgcctgtcaacatggacagcgccggcgcgatagaacgcgaatgacgagccaaaattgacctctcaatcatcgacaccaaaatggctggtcaaatatcgtggaagtcgcaaggcgaggacgttgataaggaagaccgagagcggtgtcacgcgaggatcgtcatcggataacacgcctcctcattccgaactaacgctcctctagcttgttctccccccatttcggtcttgactaacatgttttgcccctctatcgactctgcggaatgagctggattacctccgtaggcagaaaggggtccttaaaccgtgtttccccctaaatttcagcaatcatgacgaccgcagctggcggaggaacaggctccagcctggcacgagcaattatcattgtcacaggtgtctcggctttggtttcctctctcttgtcctttgtgtcagtctatccaatctttttcgacctaactcatggtcgcgctcgctgtaaactccccggctaacgtgttgtctcaaaccacaggtccatatggtttcaaacgtacgagcttataccgtccaaattcgagaaccgtggctcaccatatatatagcaaaaactaccggaaacccttactccaacgctacgttgtgcgtatattgttgatgttagtgttgactcgagtatcagctcagggggctagggcaaaaaacagtgctgattgaacttagggtcccgatttacgcagtatcatcatggacgagcatcatatcgctaagggcggcacagtttctagatcctgttcgtgacatctatgaggtatgtggggctctggccgactgtccgataagccctcattaacgaatggcattggcaggcgttcaccatctataccttctttcagctcctcatcaacttcctcggcggcgagcgggctgtgatcatcatggctcatggccgccctcctatctcccatgcctggcctctcaatcacttcctcccaaagattgacatctcggatccccaaaccttccttgctgtcaaacgtggtatcctgcagtacgcttggttgaagcccattctggctctcggctccatcataatgaaggcaaccgatacatatcaagagggctatattgggctgagctctggatacctctggacaggtatcatatataatgtcagcgtcacaatcagtctttattcccttgccatgttctgggtgtgtctgcatgatgacctcgcgccattccgcccagtccccaaattcctctgcgtcaaactcattattttcgcctcatattggcaaggcttcttcttgtcgatactgcagtggctgggagcgcttggtagtgttgctgggtacacccccgacaaccttgcggcagccattcaggacagtcttatctgctttgagatgccattgttcgctatggctcattggtatgcattttcgtggcatgactatgcggacccgaccatctcagctgcgcgcatgcccgtaaaatacgcgctgcgcgacgcattcggcgtgcgagatttggttgaagacaccaagttcaccattcgcggtaagaattacggatatcggctgtttgactcgggtgataatatcatcccgcatgaggagtcagggtcgcgggtcaagcgagtaatggccggcatgagatatgagcgtggaggtaaggcaaaatattggatcccagaaccgggtgaagccaacagccgcacgcctctattgggcggcgaatccagtcagcgcggccccggaaataaacgggccagtcaaacctccagagagagaatccgatcatacagtgaaattgatgaaaccgcactggacgacgaggatgagcgaatattcctcaatgctcgcgcactagaatatggagactggaatgtgagttacgctgatacagagtggtcgtgattgcaatgctgaccgcgcatagtacccggtgattaccgccaacgtggtgccaagtgaccaacggctgccaccctcgcggagaaatcaagattcaaaccgaggggcagatgtcaaaaaggcccataggcacaggaaaagtcgcgcgtcaaatggtgagagtaggcaaagtcacaagccaaagtccaaaatagcgggcccaagctcggcgactcccggtcccttgaagcgaaacgtcagttccaccagttctagcggtacgcagcgcagccagctggttgaccttgtggtggagaatacagaggctgaagaagaagttcgagcccaaacacagagagagtatggctctgcctgggcagagcctgaacctcgacgattctcgtaagttgccaaatcgcgcatagcgacactagaggcttcagagcagagttattaatcccgactccaacctccagaagaccctgtgaagatctaatcgaagaagaggctgaagccaactcgatacagccggagaccaatcatgacgaagatcggcccaaatgggcctacgacgatctagagcaggacaatgtttggggcaaatagtgcgcgttctatggtgtatggtgtactctgtctcttcaattatctcggattatgatcatctaccttatttactcatttgctcattctcggtctgatatgtttgtatctgtgttctgtacatatccttcgaaatggaacagaagaaaggaaaacattatgaaactccgagaaattctaaagagatagaattatcctttccaatctctgtaagcgcccgactttctcgtcacaccaaaactggacttgataggcttgagagggtgtagctcaaaataatgagcacagatgtgataaccccactagacgtcaacgaatagtagtgcttcgatcagctctgctaccgacgatcaatgctgctaaatgcgctggcttcggcgtgcatgtctttactgggcatagaccccggttactagtgccacgatgatatgtacctggacgagttgggtaaggcgctcatctttgggcttatatgatggatgttcccatcccgtctgaggggctgatttgactgcctgtgcaactggttcgttcctttcctttgttttctcctttctttccctccaaggtgatggattgatttctcgcgctggtcgccatcatgctggctttggagagggcggggtcgttattcactggctggatacgatcatgctttacatttttacctggtgacgatggttgtcaacctagacaagctgggaacggtatgtgtccgactacgtcaaaaatctagactcgatgggactaatatacatcgcaggcgttgaacgggagatgaaaatatgccatactcaaccacatcttgttccacctatgaagctggtggtatacgataacctccccagtccaagtgtccatcaatctcgaaactcactgtcatcatggttcaacgacagtcggaacttggcgtcgcgagcctctaaccgggcaagcatgtctttaaaacgctcttcaacgaccccattgaagatcagcgcaccttcagactttcgcagagtgcaatcgttccacgatcacccacattcattcaattctccgccaccaacctatcaaccattggatctccgcattcatcgatcaggtaatcgattgtctgaattaccttcattcgaaaccttccaactaaacgaaagccctcagcgcaagacgctaccggtaccccctcgtgccctcacgactccgaccaacgttcgtgatcgatattgccaaaaagcatttgtagtctctcgcaagccagttgggtctcagaaacgccgatcacttggtaatatggagtccctgctcgtcgaagaacccgttcgcgccactagtactctggtaccacatttctccaaggtcatccacaccgagaaacctctcccagaagctcaggcagcatctccaatccacggcaggtcaaaatcagaaggaagcaaggttacgtcgaacacccgatggccaaacgacgcaaataccacctggggcagagtacctcggactccacctgcatccaacagtgtgcacagagactcgccggatacatccccatccaagtactcggcaatgtccaaggacagtccttcgtcagccagctcgcgcacgatgatatcacaaccctcatcgcgccgtccctcaattccacttcccaagaaccgagactcaatcgatgcaatcccattctctctttccaaccgcgtaactcaatggatgtgccctacacccaccaactcctctccgttccccaggcaagcctctatgcccggcgagaaagggtttaattgggagcgaacccgcacgctgagtggcaccacagtggcttcgactagtactacgactttcaccggcggcccaagaacacggaataatggctccatctctagtgccttctccagtgctattactccccgcacctcattccaagtcctcccgtctgctacagaaaaagatcttgacgctggtgtctgctacccgaccatcttcgaggaccagcaacagcaccatcacctatcttcgtatcatgacaatggacatgtgcggtaccaagagtctagtattggggtggcgttttaagttgtctggattttctttggagatgacacttttggccattctgagattttgataatgagttacccagtctccttcttttctttctgttagaattttggtttttcttggatgtctgttgggtattttcttttggacttgttttatttctattgcgcgttggaataccccgttgtgattccagttggttagttctttccaaggttgctatttgaggtgattaaccgtggtacatacatagcttatgtaggaagtaataatgaaaacggtctggatatgactccatgggatctttagcagtcagaaaaggattatattcagtattctactagggagaagaacaattatgcaacggcaacacatatttcaaggtccaggctaacacacatggcatctgaccacgatgtctggacataagtcaattgtacacaaaggctaacgatagctatttctgtagggtatctcaaaaaagacaatatagctgtcagaaaaacaaatagggcacaagttaaaagaaaggatgaatgttatgtacaacatacagcaaaagatcgacgtcttagctttcatacgagatcaaagctttagtccgtgactatatccacaccgtccggggaagtacttatggggccgattttgcggggtttttgcatgccgagaatctcccaggcacggcccatcataccatggcctgagccctggggaaattcgacagaagccttgtgagcatgtctggagacgcgatcacgcatggtacgctcctgcttagcggcagccagacggtcttgttcacgttcgtgattgacaatttcgtcgcgccattcggcccagtgctcgaagttttcgcgctgctggagtacctgataacggaggcgggtcttggacggacgccaagcagcgcgacccgctttctcattgccgtcactacctggaacagccatcgtggacttgagatcggggacacgggactcttttgtcagtttgagaagatgggtcatgacatcccgactttcgagggcagtgcgttggattttttcttgttcgggggttggtttggcacgcacgagcggcgcatcaagccatgcgtgcatttcactagatctctggacggagtatgggtcgaggatgttcgaacggcggttttcctcgcgcaggaaacgcacagctgcttggaggctttccacctcagcgcggagagactcgttctcgtccatggcagctaaagaggcctcactagcgatgatggcgctgttacccgtgggcgtcagacctactgttccagacatgcgcttcattcgatcaagacgagccatgaactcatctcgctctgcttcggctgtctgaagctccttcttttgttgctcaactattttctcgagttcactccctgctttctggatttcctcgattctggcttcgagttctttgaccatggcagccttcttgctcgcctctcgcatccttgattcaagatgctcgatctttaggccctgttcttcaagggtattgtccttgactccaagtgcggctgacgcttcgtgaatctcatttctcaactggcgaatctcctcgtctgcatccggggatgtcattttgttggacttcaattctgcagcgcgagcgacccaggggaatgcagctctctcgaactctgtcgtgcgagacagatctgatgaaatggtatccagctcctcaaattggtcgcctacttgttgcaatctggtaaataacaatgatatagggtcgttactttcatccaggatttcggaggacgaggcaaaggacacggcagcctgggacatacagtccagaatctcctccgggctaaatgggtgcgtgcgaccttcatcactggtgaggacaacaaggttctcgccgagctttcgagcaaactctgaaagttgcttggtttcattctctatcgtcttgaacggttcttcggcgtcctttgggagcgcaagtgacctagaacgcagatcatcaagagaccggctgatcttacccatcgcaaccttgtatccgcgggcctgagaggcgaaggtgtccaatttattcagagaaatcaggttttcttcgtcgccttctgccgcggccaccatcttggagctgataatcagcttaacgcgtgcgattgcaccggctgaatgctcaatgtacgattgagacaaatgggcccgcatacacagctcatcggcaaacatctccaagctggaaggaagaagggtctcagcaaggtgtgcgaggagagcgatagaccgctgcaattccactgcaaactttgcaagattcacttcgtccttcttcataggctcgatccagaagttcaacatgcgctccactggctccatttcgaacattgcgatcttgatattggcaaattcctcgggcgagcaagctgtgatatagttcacaaagcgatcacacacgtttgaaatccacataagatattccaaaaccacatgagcttggaaaagttcctcgttggagactactgagtgctcagatcccttatcttgtagagtgctgctcataacattggctttgaatccgacgcgcttgaatcgaagcaaagcctgaatagaattcttttccccttcaaagtactccggaagatagagctttatcatcgaaaggtgctgtgcattttcttcggactccatacggttcagttcaacatcgatagatttggtcagggccttcgattgattggcctggagtttcatattcaaatcttgcatctggcggtggcgcaatgcattttcggtggtctctgcctccgaaacttgctttgtcgtgcgcatatcatccaagtcacattgcaggttcgtcaccaaatccctgaaacgcgttaatgtatattcaaggtcctcgataacttcgtcctgttgcgtgatctttcggcattggtcgctgaacacactctctcggtactcaatttcttcttgaagttgcttctcagtctcaatatgggtgtactccatctcatcgctaatctccttgagagattccaaatcctcgatggcagctttcagctcattaatctcatcctggtagcgcatgtttttgtctgctaattcttcaatcatttcttccgcccccagtgctgtctccagctgctgcttaagattatcgacattggtctcagcgaccaaaattctctcctttgcagcctcgtaatcagacttgacggtagcgtactcctcgagatcctcctccaattctttgatctgagacttgaggtctaactcttgctgctgagtcatatctcttaaacgaatgagcgcctcgcggagacgttcattggttctttccatctgaagccatccatgagtggttctgtcttcgggggtggtctcctggctgtattcttcattctcctctcggagaacctccacctccaaattcagctcgtccaaccttgatcgtaacgctgcgcactcatgtttgaatgcctccgctgtctcctctgccatttcgcggtcaagagtagccatttccatgagcgattcatgctccgcctgcatgcgttccacgtcgtcagaacgagcctcaagttctttcaactttttgcgcagctcggtgacttccatttgctgcggttgatacttggcttgaagtttctggatgatcgtttcaaatttatcacgctcagcctggagttgctcgagggtcttcaacttctctttgtcgtcggctcgtttcttttccattattctgagcttggcattaagttcttcgagctcgcgattaactgcactgctctgcccctggcgttgagatgcagagagcggggccccaggacgcgaggctgcaggtcgcgaagcagtcatcgactgtcgagaggtcttcggcccggtgagtccgtcttgtgcaccctccccgtcagtgtcaggcgactcggtctcggttggatctccggatcccccactcatggccgcgtctcctccatccgatgcttttgcgttgctaacctgccgtagtgaaggacgctttgtcaatcccggggttgatgaagcaacggcactttgggagcctggtcttgaagttcggactgctggtccagataccgagggccgtgagcctctagaggctgttggctgtgttggagagggacccggggggcttctggtgctgggagctagtcgtggtcgattagatgccactgtagaggtgcgggaagtactcccgatggacgggcggcccgtagtcgttgcgagttgtttcgttggggacttcgtaggggactaaattgagtagaatcataggttagcataatggaacggaacacctttgtaggacatgacatactcggagagcggctacacccttcggcaccggagtaggagttgaggctgcattgctgctctgtcgccttgctgctgtaggaggtagcccagtttgcttgcgcataccagtggagatcccaggtttaggctgcgctttgctacctgcggcgctgctagccagtttggcggtttgtttactctccggctcgggctggacaatcttaacaaccaccgttggacggacaaacatgccgtgtcctggatagcaatcgaaataccgttcgccttggactgcgccatcgtttttgccggtggcttcatctaattcaaggcctatccactgtccgtccgcaaaatgggtgttgccaatgaaacgcactgttgctagccgtccatcgggcagctcaatcaccgtgcctacagataaggcatggccagacatttcgagtggattcaagagctacaatgagctcttgagcgatagctgagaagttctggttgttgggaggacagaaacacggcaactcctgagtccaacggagcgcgtcaagtgactagtttctgcctcaggcagaaacttccggtttacgatgtagatcactacaatatagttactgagtacacgcattattgatccaaaatactgctaactaatggcttctccgttgtattattatagcaggcttgaatcttgatttcgttttgcattatccagagcccttcatgttgtacgtcctatataaataggcccataatcatatacattcatagttgtaaaccaaaagtctagtgggaataaacaaagagtgtcgtagccgggtctaaatctaagcatcaccgctttctcctcactgtttaaagaactggggaaaaagtaccgggagctcttggaggctagagatcgtgtgcttcgaagccggcttgtgtggtacgggggtcccttgttcgactaggtgaacggtagtccatccccgagcatgcgcatgtacgcaattcaggtgtgaatcatctgatacggccttattagcatgaagagtccaaaaggtccagacatgcagtggagagtgacataccaacaaaatagcactgatccgtgcttggagcaccagcttccttctccgctttggcgtacatgtcctgaccaggtttgcacaccaagggcaagattccatagtcacaataggtaataccttcgaacagatcctcaataccgagtaacttcaccacacgctttgcgtggttaatatatgcgttcgtgagcagccatggtttcacctttgttgtgtccagggtttccaacagtttgcgcagcttgggatcaggcttgaggatattgtcaagaggtagcgcatcatcaacctcgtagttgaaggcaagcgggtcgatcttgtggtggcgggtaaggccttcaatggccagtccatactccttgtagtatttctggtgtagcatatgggcatcttccggtgtaaggtcgagatgtttgacaaagaaaacatctagcacaagtttactatattagtaagatagtctagcacactatgttggcttcacttactgatcaatgcctgcatttcatcgtggatgttgcaagctgcgtagaggagcgctctgttattagtagctcatagagagcggaagtcaagagcaccaacatttagaatagagctgtaggagcacatagtaattagtggccacaatgttgaatttaacctctcttgacttacacaattgtcaatatcgaagaagaagaccggccgtgagtcactgactccgttggcagcgttggttgacatcgatcttaaattaggaaatcgcaagggtagataatcaggtgaaagtctagacgaggtcacgataggtctaataagccaacaggaagataacgcaaataaccgatgcataagtcaaagagaaagtaaagtaagatcggcttccacttcttactagcgccctcatgttcccggcagcaatccgcgaccttacataatcggatttagcgccctgacggccggcatggtggactttttacgacacttcatttgctcttctatccaatcctcggagccttctcaatcgtagattggactgagtggatatttgacgtgggttttacgcgtttttagacatatctgcttccagtctctctcatcttgttctagctttaccgatccctttccctagctttcccaatgaccatggccgcgactcatggaccaacaactcaccttccagcaggtcctatggctgtttcagcctctacactggatgatgaggtacgggagtacgaaaaaatcttagccatcaatgaccaagtcttctcgggcactcaccctcggctcaatgttccccagcacttggtgcgcaagcctgggagaaatgtccaaaatgtccctctccaaactcatttacctaaaaatccccctccgacagctgtattggcgaatacgcctgtggttacaaccacaaaacagccttacaatagctcgcagagtgccgcggccagaaacgccttgcctgcagcatcacaacccgcccgtgtggcttcaaaacctacatccgagatcgatcctatcttcttgaccaagtcggatgacctaatcagggcggaactacagttacaaaggcagagattggaaagagcgctgcgtgatcaagtggagtccaagaaacaagagaccaaacagagacctgcggttcaagacacgaagcccgactttgatgtctcggaggttttcaaacaagctcttgaggcagtgaaaccagtctcgctgagcgatgcatctgaggccagtggacctggcggtgctgccagtgattccttcgacgacaattcattttactccagtagagctcccgactcgcctccgcagactggcgggcaacataagtcatcccccgtggctgtaattgcacctacaggacctgccgcacgtggtccggtaacccattatgcagatgagttgcagcgacttgaagctctcaaccgtcctggatctgatcaggaaatgccagatgcttaccttgttgctgaccagcgtcaatcccattctcagaagcagggccgctaccataaagcagaggctcccgtcagccgcttccgcgattcgcatcggtccgagatagtggacgaacccgaatattctccaccagctccagcagtgccgccagcggatcatggcgaacatccccgtgggttagaaactggtgctggaagaacatctaggctagatgcgagataccccgaccgaacccgagatattcgcaagcccccgtctcccacaaacgtgaaggtagttcgaaaccacatcacatcaccggcagctccccggccatctcgggtgtcacctctggcaactgccaaggttccttctgttcagcaagtccgggatgaacgtccttctgaccaggtgtactcggaccttgattctgctcgtggcagtcccaacccaccggcatttcaggtcatgtcacggaaacggagaaggctgcgtgaaggcgatgaaggtccccgtcaaacgtcgcacaggacacaaaatgcagaacccgtggaggcatttatcaaagaggagcctgtttcaccgccaccattcgccgatgattctacggttgttcgcagccgaaaccctgcagagcgccccatctacattgacatcgcgtcccctcaatacactcctgtatatgaaactcgcggaccgctggtgcgagagccagtttacgagattgacccgtaccacgagcctctatcagacgttgggccccagcgcacaatatctcgtctgagcatcagacggccaattcgggaggaagctgatcttcgacgagtcgccagctcacagtatgctcggcaatcagactatgctcgtgagtacattgaggcccagccacgcccagttcgagcggcatcatatgtggtggaacgccctctgcaagagcggtcaaggtactacgaagatgcccctccttacacacagcatcgttatattgctgcggatgacatgctgccctcaacatatcgggaggcttactacgaagaggcaccgccggtgcggatgatggcacctcctcgacgtcggatcgtggttgatgagcatggcacccagtactacgagttgccacaggcaccaagactgcagccgatggcacccccgcccccgcccccaccccggccagtctctcggatgtcaaaagatgtttatgaagaaagagtgcaccaccatgcgggcagtgttcgtgcgccttcagttgtgcaagacccctacggtgaacgacactatgtgcaggaaatgcccccgccccagcctgtctacaggcgagtgacgtctgaatatgctcgtcccgtagcagccgatgagagacaaggctacgctgctcctttggaaggccatgaaccttactcacgcagcagcagtgtacaagtagcggagtacattcctcgtcatgcggtctatgttgatgagcgtggagtgccccaggagagaataattcggacagccagtgttcgtcctccacagcctcactatgaaaactcgcatgaggttgttcagcgagttgggagcgtgcgaccaactggcccaggcggccgcgagcccagtatcttcagggacagacaacttggggagtatgttgagagaccgtattacattcgggatcgacggtactatgaaggtgaaggcgaagagggagatcacatcgcgctggatggcgcgaatgatacgatccagcgaggcccacagcgttattaatagcgtgccatgcttgaactttttcttctatttgcgcagcatttcatgtctttgtatttaaatgtactattccatcaattcatactttacgcatcatactttacgcattatcactacgtaccagattcgtatatcagatatcttgaacccaaggaaatttgcacatcagagggtggcagttaagcatcttataatctcagtcaattcctcgtgcttgttgaatatattggtagtagcagtcatatccacaaatcctcgtcggacattgttcttgttgcagctctgatctgcaaataaactgccaatctgttgtgtaaggagagaatccaagtggtagattgattttgctggatcatctagcttcggggacttgtgttcctctcacatcagatggctagatattttcaacattctgagtatcagaaacaaagcctttatcatcatttgagagttctgaatcaagtattccctgagggctgaaagtggatgtatggaagcatatcaggatatttcaagatttggagcgctcaaaaattctgcgggctatgcttgtaccttgtaatatttcttgttagcctgccatattcaattaaagtcgctgaattcaagtatcattcaaggaagaaaaaaaagaaacaatgaaatagcctaggctgcttccacctcgatcagattgagattaagtttgttcacgtggacttttcaacttcgcctaaatttatcatcatgtgcaagtaaagtagtggagtatggttgtgttgaaaacgaattatatatagtacctactagaatgatagttgtcgagagacaatgtgttcgagctttcgagaaacgaggcatgcaagacgcaatcctgcaacttctagcccgtgctaggtcggtctgatatacctgaatagaatactatcgtgattagctagtgatctctttctttgtcatgggagtagtatggcaagtgcatcatgattagtgacagcttgtatcggagtaattttgtatgacatggtaggttccatacacgatcatccgaattatcatcatcacttgcaatcattgcaataatcagccattgtgtgggagggcttaggattgataccttgttttgatgtgaaccaggtcacgatgaagaaggctgccagagtatctgggatgtcccattccgcaggcatatgaatagatgaggatggggtccaagaggaccagagggttggtccctactggcctctgttgccgtgtggatatttctcactgtattcgatgtaaacttgacttaaggaaccaggttatagaggaatggaattctgtcaaagcaaaagacccagattagctagttgtaggagtcaaatggggactatactggcccagtaaatttcaggcacatattgattttaatttaccactcacatctcgcatcagagtgacaacttcttcgtcatgtaactcggtccattcccgttgatcgtcatttgcaagagggcatattgagacagacgagggtcacgtccaagggtcataagccatgcacaggagtgaacttactacagggcagtatgtagcatctaaatgtgttgtgggtagtctatcgagatggtcagaacctttggccttgaccgtcattaagccactgatagaccgaattggggagagagttagttgatgaaggaagatgcagggtgttcgaagataggttgtaaggagaaagaggtaaacagaaagagaaacaatataggtaggtatggaaagctcttgctttgtttgcccactccaaacaggtcatacacacacagcaccattactgctattttctatctcaccccaattataattcattttgtaatcttattgacagtaaggttgccgcttcaggtagagatcggctcccggagcacagcctgagtactccttgagcacgccctgattcctactatgtgttgattataatggtgtagctctcttggtggggattgggaagtagagtgttgctgggcttataccctgtcgaagaatatgattatgttatctagagtggttgttgatatatgtatgatccaattgttgtattacttgacttagatatatattcctcaagtgaaatccattggatatcgcattcgtatgtgtcaattattgctccaagaatagaagagaatttcaaagttgtcatattcatgtattgtaggttctatgtgagcgaactagccaaagtcctcggacggtataaaagatagtgtccggctgtataaagatagtgtccggttgtagtacttatgcccactcatccctactcagcaaggcatcattagaccagcaaggcatcattagaccagcaaggcatcattagaccagcaaggcatcattagaccagtctccattccctctccgttatctccctgagggacagcaggaccgcagacgacggcacgaacagcccgatcgtctgattgcgcacaagcccaagactaaccaactgcccggcccactgccagccgcccatagcgtagcacggcatgaagacaccagccccagagtcgccagtgccgcaaactggctctgtggcctcactcagcgggtatagcgtcagcaaacgggccaccattaccgtcgggtccgacatgtcggaactatcagcagtgcgggcacggaacatcttcgactcgaacgggccgacacgtccggcgctgcacccggtgcgcgccccgtccttgtaaacgatcgcgccggcatccggatcggctggtcctactatgtggtgcagattgaatgtggctggtggacgtggcgcctctttcgtgacactcaagagctctgtcataacgtctgtcccccgactgttaaaccacctcccattatggcactcccatccgtctgcaaggcgtacaagggctaagtcgctccgccagccctgactattgaccccgatatcgccatggaccacagtgccacatggctccacccatgccgataatagacgcgcgcgactctgactgtctgcctcagaaacggttttgaacaactcactcaggatgtcaagccctccgggcgttatcacctgggtttgtttcttctctaaatatggtagtacatgatacgctgtgagggcatatttttccccgtcatcattgttgctggtaggggcgagaaacaccccaacagaacccttggactcctccttctgtagcgagatcgattgaccatggctaaggcggcctgggtgttgcggagggcgcaacatcaagttcttgcgtaacacaaagctgcgctggctcgcctcccagctttccagtccagcgagtcccaggatatcttcggcatcggctgccgggccggccatctcgcggatctgagcattgagcacaattgtgggcgtatcctggtcggggaggaccgcgagtagcgcggccgtctcgtcggcgctaacgtgaaggcagacgcactcgatccacagcctcttccagccgaacgggcaccgggtggcgagcacggtatgaacagtgcggtcacggcgtagtagattctcgatgtaggttaggtcgtcgtctagagggcgtaccggcccgcgagtcatcgatgggagcatcgggagcatatccggatcgcaaacaacttcttccgggaggggctccctacgctgtgtcatcatgtccagccaggtgtcctctgtatcaaccagtcgctgattgtatccccgcgggccgtcgaggatggccatggagcgccagagattgggctctcgatatgttggttgttgcgggaagacctgcaggccccagcggagcaaagaggtcatcgtctcctggtagagcagaagagatatcgaatcgataggctcggggtgtgggcagagatcggacagtggtaggacaatggtgccatcatcgagcgttgcggcgctgccttctgccagggcacggattgccatcagcacggtctcgggcgttcgggatgatagaatggtgcggatcttctctgcaaactcgcgaaagactgttggcgtggtcatcttctcccgttttacgtgtggcgtccagggagagtgtgcccatttgccatttgccgttaggctttgtgggtgtggttgcccgcgaggtgattaatgctcagcgttatgatgatagatgactccagtacgggcttcttgggcaacgatcaggggcaggggggtagtagcatatacttacagcggtcacagcggggaatatctaagttactgtggttgtggaaggcaggagtcgcaggactctacaggaaggcacgatcaacaaatgaaatcggctgggctgcatgtacggtacgagccacaggagcgatctatggcaccagcgatacaaacagtaataatttactggctcactatacaatgatcagcgagctgctcttgatcgcgcactttaggctcatgtcgatatggatggaggtggagtctctatggaactcaacgtcagtccgagtcccgactcccgcccgccgattcccacctcgacatcaaaacccgtattaccctgtgtattacccaggggtactgtatagcggccccaggatcacttcaagttcctacctaggattggctatttccaaagattgttatataaaaattatgcaatagaaagtttctggtagagaaagaatctctgtaagttgtcaaactgatttcggtcctccctgtaacttgaaatagttacagtcagtggacatatgtttttacacccctagccccactcccctatgattatataatatactgccggtcgaaaacccccatgagttcatactgtaggatcttgtacttcgcattttaggtaggcggtatactaatatggtggcggtgaactgggtggggcattaagggtgtagaaacttatgtccagtcactgtattttctttcgtaatgtaattacagaacttttgtccaacatgctcagccacgctgtaaacagatacgccacaatacccgaagcactgctccctgaccgaaaaagtgggccaaccgtatcacgtgcctcaatgatgactcagcctccggtaaaaagggctccaaaaacagcgtcccaggtagctattttcagagcccaatttaccgtcaactagcattggggtgaaatgaggtattgagaacttatactggtccttgattttctatatagtagtagcaaatggcaggatatagccatgctagatattgttgtagttgtggttgggtttaggtatcgccttgccgcagaaaacaataaatttgcagtggaaacttcctttctactgtgttaatattccaatcagcgtctgcatttgcctggccttagtgctttgacaacatagcctgccatcttgggtccaacttgtttagtagtatcaatgctctatcgtatcttagggtcactacaacaattgaacaattaatctagaagacccttcgatatgactaccctcgagacactagagcttattaacattacgggcatcattaaatggacctaggcacaatttgcaatggttcaggagtaacgggtgttcatcatcaacgctcatgtagggacatgaattccgaatttggtattttatagcaagttgaaatagttgtggtgcaatcagcaacgtctcactcctttgcagttattcttatcgggaaatttcatgaattcaggcttgaattgacggatttcgctattaatagcatgtgttgttaggaaaattgacatatttggacactatcaataatgctgatgcttgagacgtttgtttttgacatagttaacggcttacagcaatcgttgtagtttaccgatgtagtcgaagtaccacgtgtgaagtatatagttctgcggttgaaaagtatatcaactagtaacgatccgcctaggctatcgatactacactctgtggaatagaaaaaggtactgtgctagagattatgttctgaataattcctgatggtgaagtggcaaaagtcgtagttatatatcacgcggtcaagtggataagccccgtacggagtgccaactttacatttccgactttctttgtccgaggaaaagaaacagttcaaatcttcacaagcttattttaactatacaccaattaatagcctcattatcttgaagcttgctctaaagccaaggccaatgtgataagttctctctgactttgaaaccgaggacgggatgcagtctgattttcaaaaccaacggtccagtcggaattgtcgagtcctttggagagctgaagaagtgacccactactgcctgtacgagaagatgacgtctaccatttgaggggaagttattccacctgggtaatagttccagtccccagttcattgcagaaaatacgcatagcattgcatatcattgcataggatttgtgtttggatgtatcggaagcgcaacagtttgtcccccggcgccgtggagcccgaacatgtcagagatcagaagcgatcagaatccagctaaggtatcagcggtatgatcaacctttagctccacatgcctgaccacctgggcaggcttgacccctcagttttcccagcgtccggtccagccggtgggcagtgataggcgtcctatcaccacctgtagaccagtggattaggatacggcggcatacagggttctctgtcccggagcctatgaaaggatcaacctgtgtatgctaggtacggtacggaatgactcggatcccgaagtacctgaggcctgtcaaagcgcgtagaagggcactttactgtaggatctcatcactttcacatacccacgtgatagtaagacaaagccggtatgagacacggtttccagggactcaagttcgagataccttgcgatattggccaggtggtttatgcctgtatcgggtactaacaatggctggattccatttgccaagaagacccttgcgaatagacattcaagatcctgcattctcgattgatgacaatgtggattcgagaaagagatatcaagttaaagaccctttgagacccttccctagctaatgtcttaaggtctcgagtaaaaagggcatataaatcgaaaactgcaaaatcaagtagaagacccgcaaggactgaccagacctatttttttcccctattgtttttgttaggcttccttttcctttcctagtttctttttatattaagatatatacacatattgtatatttgtatatttattctgatcgcattcgcttttgttctcatatcgtatttagaggcgttggttggccccatcgatcttcgtttccaccattcccgggtcgaatcgcccacacaggtcattcccatccctgtcgagaacggcctgattccttcccacatctcccccccccccccccccacnnnnnnnnnnnnnnnnnnnnnnnnnnnnnnnnnnnnnnnnnnnnnnnnnnnnnnnnnnnnnnnnnnnnnnnnnnnnnnnnnnnnnnnnnnnnnnnnnnnnnnnnnnnnnnnnnnnncccccccccccccccccccaacccaatccatccactctctccctctatcccctcgactcgctcaaggggttagagatttctctaactagtcatgcacaagatatccaacttcacgggccaagcccgtcatggttgggaacgaatgacgccgactttcgggatgtccagacctcacaccgatatggcttttcgccgaccacacggtgcgccgcccatgacaccgccgaccagcatcgatcccacagtcaatctgtccttcaacgttccgttctcgtccacactagccggccccgatgtcgaagatgtgctccacgccagccccggtgccctccagcgctggactttcccggaaggcacactggagggcacatcggtgcatcagcttcccgtccacacaaataatgtcgaaggcttgcagagattatgtcggaagatcacggaagagaaaggaggacgggtggaagctacactcacaacctccgaggccaaggctgtgccctcgctacaacgccggccgaatggcttggtgaccaacgtctgtgtcacaggagatggagatatggcacgcaagatgcgggcgagaatcttgaatgagaccccgatcatgctggtacgtgaacgaatttttttggttccggcgccagcagtattttcatgtccacggacatcccttgctaacatcggaccgttcgctagcgatgtgccactgtcgatgtggatatgcatctgattatagatggatcgccaaagggaatcagagctagcgtccttgagcacctggacactttagccgcctacaccggagccgatattttcctactgactcccaaactccatgatgcggatagtgcggtagtttcgtcatatggctatgcgtcggataatggcttggaacagcgcttcagggttgccatttacggtgatttggagagctcggaacatgccaaaacccgggttctgatcatgattgaccaaatagtacgtctttgtgtgtgcgtcgtgaggcaggcgaactgaccagaaaccagctcaaacgccacgtggatgccatcaaactggactcgactatgcacaccttggtctgtggtcgcactcgcaagaacatcaagctcatcgaggctgctacaggcaccgccatttacttccctccacctttcccgcaaattttcggctacataccccccggtgcgaatcgtcgaagcgaggatgaggtttacattacaggtgagacgcccgaacagattgctcgcgccaagcagaagctgcgagaactagtgatgggagtcaagatttttgtcaaggatgtggttgtcagctcaagcaaaatcgacaatatcttactcgatcgtctggataaggtccggaaggtgatggaaatgaacggctcttatgttcttttcccgcagcttggtagccaacgcgggcttgttcggattcaaggaaccgaggtgttgcacgttgagcggacagttcgggaaatcatggctctggtgcgtcgctttgtggtttttggtggaatgatttgctaatatttggatgtacaggctggtcaattctatagtgcctcgtggtggattatcatgcccgaccccgcccaaggtggtctccgtgctccctcaactgccgatattcgctccatgctatcggatatctgtaccaattcggaagcggaggttagctttgacaatctgactttcacaatcaacggttccgatgatgcagtcaaggctgctatgtcagtcatcaaccagatcccattcgtgatgcgaagtcaataccagatgagggtgaagatcgagttagccaacgagcacaaggagtttgttagtggcaagaagaacggaaagatcaacaagatcatgggtcagagtgagtctcaccggacatctacctgtaacacgagatactgattggcacccaggcaatgtccagatcatcttcgatgggttcaacgagtacaacttctatatcgatgtgtgcggcaaccagtatgaatcgaccaagaatggcttggacttggttgagcaggagatgcctgcatcgatctcgttccacgtgcctgaccaatatcacaagcggatcatcggaattggtggacagcatatccagcgtatcatgaagaagtactctgtcttcgtgaagttctccaatgcaatggaccgcggtggcatgggcaaggaggatgacgacatcaaggttgacaacgtgatctgtcggacccctgctcgcaacgctcagagtctggaccttgtcaagcaggagattatggacatggtcgagaaagttgtaagtgcttacagtggccaaagctttgatctcatgatggaaacttacgatttgcaggatgccgaatacgtcgccgagagagtcgtcatcaatcgcttataccatcgtgagctattggcacgtatgcctgagattgaagagctggagaagaaatggaactgcaagatcgagttcccaagcactgagcttgccagtgacgttgtcactatctccggccctgagtatcaggtcccccaagcggtcgacgcattgcttggcatggtgcctgagagccatgagcttcacttccagagctcggctgaactccaggaatactttaagtgctccgatttcctcgccgatgttcggaccaagctcaaggagcagtacgaggtcgatatcaacgtggatgtcggtaccgatcttcctactactcaggaggaaggctcctcgtctcccacccccgggcctgaagaccgtgtggtcctcggatacacgcgcaacaacgccggtggcctaaaggacgccattgacttcttgatctcccgtcttgttgcacatggactggacgcaaacaccgtcaagggagctatcccgcgccccaagtccgactcgttcgaagagtcgctgcccttcttcgactcaaaactcctgcagcacgcaccagtgcccctctcgaccgactcgcccactcggccgaacttctccgatgagagcagcgaacgaggctcgattttcgagcgcctccgcaagcccggaagcatctcgtccttctcctcgttcatcggccgcaagaatcactccgcctcaccggggtcgttcttcaaacacgcctcgagcaacgtctccaaggcctcactcgtatccatggagtcacgcgatagcggctaccgcaacccgtggaacgattctggcgtgaacctccccgaagacgacgtgcacgtcctggggagctcgcacagccacaagagcagtaatagcaatggctggcccacacgcttcgacaccaagtttcccttcggcaccgcgccgggtgacatgacgccaaagcatgacccgcgtacttcttatgatagtggtcgtcctagcacttccaattctacttctggatacccggccccaattgggccaccgcgttaaaacaaaaatatccatttgcagcagtatacccttttttttggttgagttgtttttgtctgtctttttctgcaattattttcattcccagcgtgttttttccggttctctttttgttggtcttcttgttgattgataccacggaacgcaagcaatgaaggcgtcagaaaagaaagagatatccaagatctgcgtgcgatagagcagggagaatggtcttgaccatatcctgcctctttttgtcttttttttttcttttttttttttcgcgatgcgcattcggaggaaatgacgggactggatagtctgaatttgatgataccagggccatctggcctcgacttcagaggagttttccgacaagttggggttttatgttgatgttttactcttttgatatcccccaatcatcaatgagattttgccattagaagacattctccaatctaagttgttatgatggaagctgctatacttgatgttctatcatcacatatagatgtaagtacctgaattcttcaatatgcttctcatagatagcttcgagtgacatcgatacctcggtatgcccccgtggcgagtgacgttatacgcggggtcgaagtcaaagcacctctccacacccccaatcatcaagttacaactcccaagagaccatacaatcctattgaaacacacagctaaacacctagaacacctaaaatgacagcatcctaccctcgcccggacttccaacgcacttctctaaactggaacaccctaaatggtccctggaccttcaccttcgacgacaaagacgaaggcctaatctcacaatggcaaaagaccagcctggaaggaataccttcccaccagataacagttccatacgccttccaaaccccagcctcgggggtaaacctcatcgaagcgcacgaggtaatgtggtacgagcggcgcatcatagacatccgcacagccaatgaaaagcaaaaaggcaatagactactcctccgcttcggcgctgtcgattatgagtgctctgtctgggtggacggcgtcctcgtcggcggacaccgtggcggtcatgtgccattcgatatagatatctcggacgtcatcgccgacggcgctacagaagcccgtctcactctccgggctagagactcgccttatgacatgacccagccgcgtggcaagcagttctggggccctgttccggaaagtatcttctacacgcctaccggcggcatctggcaatctgtttggttggagagcgtcccggctatgcggctgctatgtgggagtggagggacggtgattcgttctgatgatattgagggcgggaagttacatgcaaaggttcaagttgccggacgccgcgttggaagtgcggcgaaggtcgaggttgaggtttcacttggggggctaggtattgcaaaggtgcacggcgagctgccgcgggataaaaccttcgttgcgcttgatttgagtatgacggttactgaagctgtggtggcacagctgaagacgaagaatcagaagctgttcggtgttgatggagtctggagtcggggtgtcgcgctctgggctccggagcatcctgttctctatgatattacgcttcgcctgtttgatggggccgggggtcttgtcgatgaagtccagactacgaccggcatgcgcagtctaaactggcaaaatggcgatggaacgttccagctgaatgggaagccgtatttccagatgttattcctggaccagggctactggcccgaaacgggcttgacacctccgtcttcagaggccttgaagacggacatcgagctagcgcagaaactaggcttcaatggatgccgcaagcaccagaaagtcgaagatccgcgcttctactactgggcggaccggatgggcttcctcgtctggggcgagatggcaaatgcctacgagttcgacactgactacgttgagcggtttaccagcgagtggatcgaagccgtgaagagggatatcaaccacccatcgctgatcacctggacaccacttaatgagtcgtggggtgtatccgatttgaaacacaatgtcgagcagcgcaaccacgttcgcgctctgtatttcatgaccaagtatggcccacccgatttagagaaaatggatgaactagctaatacaaaaaaacagagtcctcgatcctagcagaccaatcaacgacaactgcggctgggaacacgtccaaacagacctaacaaccttccacgactacggcgactcaaccgacctaggcgccgcatgcgccaccatgacagcgatcctcgagctgaaaggtggacatgaggtcttcaccaaaccaatatccttatacgccggctctctgatcgtcgacaaaggcgctcagcatacgcccggcgcaccggtgatctgctctgaattcggcggtgttaacatcgcaccacctaaggactctcctgccgccggggagcgggactgggggtatacgactgcgaccgacccggcagacttcttggtgcgatttaagaagctggttatggcagttgtgcaaccggggcatatttgtgggcttgtctggacccagctgtatgttgcattcgtcgttcctggcctttggatttgggacctgggaatttgtgctaacatatttccttttacttcgatctaggtgtgatgtcgagcaggaggtgaatggcctgtacaccttcgatcgcgaggagaaggttcccgcagagaaggtgaaggagattatggatgctgcgaaggatcactactaccgtcataccacttctcactcgaaggggtttaggaagctactggatcagactaagcattttgtgaatctttaggtcgtgcaatgctcattgtggatttgagggatatccagtgagcggcatcgtacctcttaagaccgtagttatcagcaagaggccatcatgttgaagctatctgaagatcagagatatattataggttcatgcggtgtcgggctacctagttccaccctaaattcttcgtataattgatgaatgaacaaaagaacatctaaaagtgatttaaaatacaaattgcccatgtagtgatgtgatcggatgatctctaagaattgcggccagcagtggatatacccgaagtgtcgctggataaaaagtgccacagaaaatactataacggatatgacgttgatccaattctatattgaagggtgaagatatagcgctttgtcgatacccaagcactcgatatattctggaacgcaggacactgtgagacctagtcaagataagtccgcgatgcaagatttaaaaaacaaaaggcccgaaaatactattgaacatcaccaaaatatatattattgtcactgggcgctagacgaaaagatcccattaagtaaagactgaagagcaaaatagcccaaagatcaattcgctggatgctgtactcgaaaaaaaaaacaaccaaaccccatagaaacgccggagatgccaagaccccatatcaggcgagataaagaaacgtgctagatggatgtgaatgcgggatgcagaatgaatgcatattacaagtaaaaaatttacatgttagccaattcctggtcgatctgtcggtccaggaaggctcgcttgtcgcccgtgagcgaggtttgcaggcggtgttcgacaagaacgcggactgttgggtcatggttagcgaactgtatgattatcatagaaattaaggtaggaacttaccctgttttttggtgacagtgtctagatcaacctcggccaaacagccgcggattgcctcggtgatagcaccctcatcgggcccactggcagaacggaaatcaaaggcggtgctggcgggtcgagaggggtactggggcagggggctgcgcgagccagcattgccgaggaggttctcgctactctgcatcatgccgacgctgtgtctgctcgaggccatcgggttgtcttggtaggcactgaggccacccatggacatgtgccgagaagcctgggcagagtggccgcccatgcgagggctcatctgcggcagatcagtgtagcgggagaagttcgacatgtgcgagttgcggtttccggggacgttgccgccgacgaagggtgcgggagactgtgggggcatgtaggggtggttgcggccctggcctgggaacccggtgagaatggtggaggctggcttgacggatgagtactgcgagtgcatgtcatccatctccatagccatttcgtcataccggccggtggcgtagaccttctcctggctggcactgacctcgccgcggcggccggggaggttattggccatggcgtagtcatcccagcgctggagagggatgctgcgtggatcgaagggctcatcttccacggcgatgacacgcttgtcgcccttctcgccgatgacaatacgggtggtaccccatgtgaaatcgtcctgtttccagaaggcatacaacggcaagacgaaattgtagatcgggtacgcaagaaggtagatgatcatccatccgatgtgttgccactgccgtttgacaatgaagatgatcgcttgcagaccatatacaccagccagcatgataatcgagatcatagggaagggacccgtgttgctggcaactcggtagatcaggtaggtgaggtacacgcaggtcgcaggaagaatgagagttcccaccagatcgacgagaacgacgaaacgcatactgaaacagcagaaaccgcagagatcttccagagctgccagttccaccaggttgtggattgtggagttgatccaacgacgtctctgcgacataaggacactccaggtatcgggggcggctgtgctcgcgtaggcatctggaataaacttgtacgacatggctgggaagtgcttggtcatgatggttgttaggtaccgatcctcgccaagagataagaggttcttcttgtggagggtgtcaacatcattgtcagcgtaatcgtgaatgactttgtccgagataataagaggacgtcctttgtccgcagttcgaaggcggtacatggtgaaactaggtattgttagtatcacttatttccgagaaagcatataggaacgtaccatccaggaagacaagtaacactgccgaagagcgactcaaatgccttggccaggtgatgcgagatatagtattcgtaaacctgaatcatggtccaccaactacgttcctcgttctgaagactagtctcgccgcaaatgccagcgatcttggcatctgctgcacatgctgcgaccaagcgattcagagaatcctccttgacggtggtatctgcgtcgaccatgagacagtattcatatagctcgggatccacaccgatgacgttgttgatttggtggaacatttccagttcaaggggggacataggtgagcgatggtgaacacggttcaagaactgcatgagaaggacctgcgtgtctcgcttgccacgattgccgggtttggacttgcgctgctcggattccttgccaaccttgacgaccacaatgtagggcacgacattgccttcgtactcatagagtccagagtaaaccttgccgtagttcagctgctcacttccctgaccgagagatttgcatggcagtgccggtgggtccatcttaggatcaaccccgagaatgtccagaacgatctttggggtggggcggtcatttccgccaccaacaatcataccatcacagatgacaaagatcagctttctcttgttgtcgtactgcaaggcagtcagagaatcaagacctttcctcagatcgttctcgccctcagtgtatgcggggaccatgcagatgacaaatttgtcctgaggcgtgggccgacgtttggaccccagctgcagagctgccaggaatttgaccagaatgacagcgcagataagaatggtaaaggtgagcaggatccaattattgacagtgcatcgtgcactttcacggaaatcaactttgccgacatagaagacaaagtcgagacatgtctgagcatttttgaaatctgtcgtgtcctcccatttgtcagtgacgtcttcgcccatgttgtccttgaagagagcagtcagagtcgagggtagccaatcgtatgtgtcgagattgttcatcgtgctcagtgtatagaagtaatctgtcaagtcatacaccttttgatccttgataacccagtagcgagaatcagcgtcggcctgcttcttgatggtatcccttgtccaaaccaggtcacccttgtagtatgtaccaatctttggcaagaatttcttttcataccaggtagacttgtggagtgctgaggtggtgcttgttgcttgtgcccccgatttgtgctcggccgtagaaagggcgatggcggatgtgtcgttgtgctgcaaagcgagtgtatcggatgtaacaaatgaggaacaataacgattgaggggagggggaaagtaggcatctaaaatctctcctccaaattgttccatgttcgtcgaggatgttgtttctccagtaatgtcactgtgttgtgtgcgccagaacttgctgatgtcgtagacacggccgtggatgccgacgtaaaagttattgtcagttgtgtgccagctgacttccttcttattccagactttgtccttgttgggacagagaaggtcaccaaacgcaatgatatagaagcaaacaattgcattgaaaagcagaatcaaaaacacaaggacgagcttttctcgccaggccaggcggacatccgggcgtttcatgcggccaatgtatcggagcacgaaggaaggaatccagaaagtcagcgcccagacaaaaccagtccagagccggcggcccaaggtgatggtcttcttctcgatgtgctttggatcaccaaactcagggtcgaattcgccgacgtaccggccatactcgtcgtagtacgcaatgtctccttttttgtcgtcacctttccggcccaaaccgtagtcaccggtattaacagcgttggcgaatggcgcactgggggcgatggacttggcaccgtcaatcacactgggggcgatggcgccgctaggtggcatgctaagaagattggaattctcatggatgggagtgccatctggggtgaaggcggtctcatacaacgcagggccgtacatgaatggattcacctgagtttcctctggcttgagatccagcatactttccgcttcccaccatgccccctcgcgcatccatacgcgctgttcaccgacgacggcgtcgccgttgctccagcctctctcaatgatccagttctcaacaccgtcctggccttcggtgcaaccaagtcgcgcatatcgactgacaaactcttccacgtcgaaatcggcggtgaaatcgagttgcttcaaacgacgattggcccattccggcagtcgccagtcccgcagttggcgggagactgcaccagcagaccacgctgtaggtcccaatgacacgagctgctccggcatatcatcagtcggatggatggagaggtggtaccagacacggctgctgttgagcgtgttggcaagatcgaatcggccacgctttcccacggagataccttcggtatcattggggaacagaacgcgtctgagaaaagcgtcaatctcaagttcaacaccaaccttttccaataccccctgccgcttgtcgagatcatgttcgcgttcccgcccggcaaggcctgtcatgatattgagatctggttcgacttgagctactgcagagttcatttcactgatgatggaagctccaataggcggaaggggaattccatcgtccttcatttcagcattgagaccaagagcatcatcgaagatgcctctcatcatgatcgctttaccgagagccggtcgtggaatatcgattacagtcaggttgactgtatcgtccgttgaccattgtgctgcaccacccccgttgctagaatcgttttccaatgcaatctgaatgtcggctgcgatagcttcatttgctttgctgatgacccaatcgaccagagcttcgtagagtccggcgatcaaaacctctcgctcatcagtggaacatttatgaagaaggatttctggatcaattcccaggagacctccagcatcctcacagacctcttccaggtcttcttggtccacctcgaacccgactgcgttgccgagcttaagaagaccagcaagggccgatagcaagcctcgctgggcagcacctttgataccaatggatttcaaagaagcacggaagtcttctgcagcggcagcatcatcggctgtgggtagatagtgtggaggattatatgtgtttgatcggttgagcaaggtatattcggcggggtctttcaagtccaaaaattcccgctccgcagctgtcgatgtcgatgttaggagataatagaaggcatcaaatgcacggtagccggtctcgggctggatgtctaaaagacccttgcgcacattgataccggaagtggacaaggcgaaggagaggccgacgacagatccttgcaaagataagttgaaagtggcggccaatgccgaatggagagaataggaggggttgaacgaggtgactgcagtaaggaaaggtcgtatagcggatagggcgatcagagctacctcgggtgtttccactgggatcgctgcgatgaagggttcgagcaacgagggcgtggattgatggagggcgctattcgatattagcacgtatggtcttcggatcgatgcagtgttaaacataccctagaacaacggagccatcctcagctcggcgtcgagcatgttcccaagctctgatagccagatcacggtcgacggtggcacccgttcgcccatcgggtaaagtggttgctgcggtcacccatgtatttacaaccaaactcgtggcggagtctagttgatatggttgccccgcggtataaaacgaatggagggcattcagtaacgttgttgttgagacctgagctccatgttggggtctgggtccgactgagagacctgtcgactgcgtggagaagaccgaataacggttcgacatgacgaatgtgaggtcggagggtcaacaatgttgaccgcaagatgcgatgtccggcctgttcgttatcaaaatcgcatgagggtactcttttttttgtgttggtcgtttgtctcgctaaatgtacaagagtggacgtgtagaggttgtaagagagttggatttagggtaggtcagggttgcacgatccaggaattggataattgagcgagtgactggagacggaactcctgaatgagtgagaaagaagacaaaacaaccgagaagatggcgtggggagaaagaaacccatggagtttgaaaattacggggtatggaaaaataccgtcgatcctgacgatcgtctcgaccctgtccaatctggcagttaagcttttgacatttcgtccaatgttctccctgaacagtcaaaacacacgcaattcaagtttctggttgatttgcaatgttcacatggcccaggttggattggaacctggtatctgacagtttcccccctgtaattttgaaaccataacatgtttgttgctctttcaccctaacgggtccctgatgggtccctgatggcttctgcttgataagttccgaccaatcagaagccacccgagcagacagcgaccctgggacccagaactccgtcgatggcgtattgtcatttgcgtacggctgtatgtatttaattgtattaatagtacctgaccttcgtatggcacatgtggctgctatatttgggatgtctcacacttaactccgtacagatgaccagtttcgccacacaatggacggagtatgatcggagacttgatatccactgtgctacctgtcctagcctggctactggtctattcgcgagaatgtcgaaccactctatcttttctcttctctagtgatgtattttctagaaccccctagttgccctagtttcagtctctatccattgtcttttgcctcttttcacggtttttgatatgcaggtctattgcaagggggttgatcttggcaaagaatatggggagttgacgtgttccagggacctggaccctgtacggaccaaactaagtgctatctacaagatacgtactccgtagtacaacctgtatgtactccgtagctctgtaacagctggagtggagatcgctagatattaaaaagatccaaaactggttctgcttcacgtattgttttgtttttgtttttgttttgtttttctctctcgctaagctatattgcagtatctctagctcttatatcatgtctcattctgtaatattgtgggaacactatcagctatggtggattccacccgagacacgtccaatgaagccgaaccgaattaaatatcggaccatccctaaatagccccccagttgatcggtatggccgaggtttacctattcttagcgaccgagctagtaatttgtgttgtatgccgtattgcacaataccgcatccacccccgacctcttatcgatttgttgctttttttccctttgtgatcttccattctgggcttctggcttctggtttctgtttctgttcctgcttctgcttcaatttttgtctctcagccgcttgtcatcctatacgcttcccattgcacctcaaattataacctagtcgaatcttcctccctaggcaccccgatgtgtacgatctcggtctgttgctaggggtctttattccgccaagtccacaaggcattccgattcgcctcgctccacgttcattccgtcactggagacttcttaagccactcgctctgtgaatatttgacgtcccaattgcccttcgcacactcgttcacgccctcggatctcatcccgaggagactcaaatatggccaacgcctattctgggagtggcccggcacacgctcagccctcactcccctcattaccagcccacctacagtctgatacacatctcacggcccatctcgccagtcggtatgaagatccgaccctgttcattacaacctcggcatagctaacgtgtgtttcaggtttcatgtgggattacctactgcccacctgtcatcccaggccctaatttctctgaatacatattcatcggcgattaaaggacccgatggcgggaaagagggaagtgctgccggcgaggctgaagatctcgcgcgccgtgccttcactcgtctcggtgcgcgtggtgagaaccaagccgttgtattcttgtaagctgaatccactctctgcatagaaacatatctaacagtcattcaagaggagagagcggatccggaaaaaccaccattcgctcgcacttattgtcttcgtttttatccttctcatcgaccccgctctcctctaaaatctcatatgccgcctttgtattcgacactctaacaaccaccaaatctgtcactacacccaccgcctcaaaagctggtctcttccttgagcttcaatacgatgcatcatcctccgtgaaccccaccttgattggtggtaagatcattgaccaccgattggagcgaagccgcatctcctccgtgcccacgggagagcgaagcttccacgtgctgtactatttgctagcaggaacaagtgcggcagagaaggcacacttgggatttgagaatagcatccatgttcaaactggtaacaggctgtccggatcacatgttagccacaagcgctggcgctatctcggtcatccaactcagctcaaggtcggaattaatgatacggagggcttccaacacttcaaaaccgcgctgcggaagttggaattttccagaggggaaatcgccgagatctgccagatcctggccagtatccttcacattggacagctcgaattcgccacgggtcagtctaccaccacaggtgcggaagaaagtggcggctattctcacgagggtggtgagactgttacggtggtgaagaacaaggatgtcctcgacaatgtcgctgcattcttgggtctcagtgtcgatactctggaaaatagccttggttaccggacgaagacgatccaccgcgagcgcgtgacggttatgctggacccgaagggagcgcgagagaatgctgacgcattcgcacgtactatctattctctcttagtgacctacgtcattgaggccgtgaaccaaaggctctgtgcagctgaggacagtgttgccaacaccatttctatcgttgatttccccggttttgctcaagccccctccacagggtctaccctagatcagcttctcagcaatgccgcaactgaatcgctttacaactactgccttcagtcgttcttcgaccacaaagcagatatcctggaccgtgaggaaatcacagtagccgcgacaagctatttcgataacacggacaccgtgcgtggtctgctgaagcatggcaacggtctgttgagtatcctagatgatcaaacccggcgtggaagatctgatgcacagttccttgaaagcgtgcgaaagcgcttcgagaacaagaaccccgccatctcggtaggtggcaccagcggatcaggtgcctatatgtcccagacccgcagtgcgttcaccgtcaagcatttcgccggcgaggtggattattccaccatcggcctgcttgaggagaatggagaagtaatctcgggagatttgatgaacgtgatgcgctccacccggagtgactttgtgcgtgaattgttccaccaggaagctctgcagaccatatcccacccgcaagaaaagactgccatcatgcaggctcaggtgagctctaaaccactgcggatgcctagcatggctagacgcaagaccggaccaccctcccgtttcgctgccccaagcgctcaccccgaaagtgaggaaggcgatgaccaagaaagccaagttgcaggatccaagcgagccagcggtcggaagagcggaatgcctggaccgactcaaggagccgccggtcaattccttgctggtctggagatcatgaacaaatgcttgagctcctcgaacctcaatccctacttcgtcatctgtctcaagcccaatgatcgtcgcattgccaaccaattcgacagcaagtgtgtgcggatgcaggtccaaacattcggtatcgctgaaatcagctcccgtctgcggaacgccgattacagtgtcttccttccgttcggagagttccttggcctcgctgacatcgggaacattgtggtcggcagcgatcgtgaaaagtccgaggttgttctcgacgaaaaacgatggcctggtaacgaagctcgtgtcggtagcaccggcgttttcttgagcgaacgatgctgggcagatatcgccaaagtgggcgagcgcgtggtaccatcctatgcaaatgccggtgctgatgaagtcgatggcttccaggccgccggtggaaacccagactccaaactccgacttcttcacgccaccgaccagtctccgggtacttttatttatggagatgatcccaaacaaggctatttcggtagccgcgaactggatggacgctctgatgccggaggttccgccttcaattccggtgatatgttcaaaaatcttgacacgaaagagcaaatgctcgagaaaaacaacgaaaaacagatggaggaagtcgacgaggctccgacctccccgggtcgtcgccgttggatgttcctagtctacctcctcacgttcctgatccctgatttcgcgatccggttcattgggcgaatgaagcgcaaagacgtgcgaattgcctggcgtgaaaaacttgctatcaacatgatcatttggttcgcctgtggtgtagcagttttcatgattgtcggtttccctggagtggtttgtccaactcagaatatttacaacacggcagagctcagcggtaagaatggcgcgggtacagctgactcttatattgccatccgaggcgtggttttcaaccttggaagtttcatgccatcccacttcccttcgatcgttccccagaagtcactcaagacctacgcaggcaccgacgctaccaatcttttccccgttcaagtctcggctttgtgccagggtgttaatgggaaagtggatcccagcgtaccattggactatcgatcaaacttgaatgattccgcagccacgacatccagctccacctttgatatcaatgccaagtaccacgatttccgctactggactactgacccccgagctgattggttctacgagcaaatgcttatgatgcgctcgaattacaagaaaggctacgttggttatacggcaaaggcaatgaagaagctggccaccgacgattcgaagaatgtagtaagtatacacgggaaagtctatgacatgacatattacattgccgggccccgagtacctcgccggccagcggggaagaacgccactggcagtgttgataccgattacatgagccctctgcttgtcaatctcttccaggaaaagcccggagaagatgtaagcaagtattgggatgacttggatttcgacacggctctcaagtcgcggatgcaactttgccttgacaacctgtttttcattggcaaagtcgacactcgagactcagttcgttgtcagtttgcgcgatacttcattctcgcaatttcgatcatgcttgtcaccattattggcttcaagttcgtagctgcgttgcaattcacaaggaagaaccttccggagaatttggacaagtttatcatttgccaagtcccggtctacaccgaagacgaagattcattgcgtcgtgctatggactccatggctcgcatgcgctatgacgacaagcgcaagctactgctcgttatctgtgatggtatgattattggccaaggcaacgatcgtccgactccccgcatcgtcctggacattttgggtgtccccgaatccgtggatcctgaaccgctcagcttcgagagtctaggcgagggcatgaaacagcataacatggcaaagctctattctggcctgtacgaagtccagggtcacatcgttcctttcctggtcgttgtgaaggttggaaagccttctgaagtgtcccgtcctggtaaccgcggaaagcgtgattcccagatggttcttatgcgcttcctcaaccgtgttcactacaacctgcccatgagccccatggagcttgaaatgcaccatcacatccggaacattattggcgtcaacccgcaattttacgagtacattctacaggtcgatgctgataccatggtggcgcccgatgccgccacccggttcgtgtcggcattcctttccgatacgcgtctcatcggctgctgtggagagacgtctttgtctaacgccaagacctccatcgtgacgatgatccaagtttatgaatactacatctctcacaatctgacgaaggcattcgaaagtttgtttggatccgtcacttgcttgcccggttgtttcactatgtatcgtatccgcacagcggagaatggaacgcctctctttgttagtaaggctgtcgtcgaggcctactcggagattcgcgtcgataccctccacatgaagaatctgctgcaccttggtgaagatcgttacttgacgacactgcttatcaaatatcacccgaagttcaagacaaagtacatcttccgatgccatgcctggacagttgcaccggaaagctttactgtcttcctttcccagcgtcgccgatggatcaattctacggttcacaacttgatggagttgattccgctgtcacagctgtgtggtttctgctgtttcagtatgcgattcattgtgctcatcgatctgctcatgaccgtcatccagccagtcacagtcgcctatattgcttacctgatctattggtgtgtgagtgagcctagtgtgctgcccatcacatcattcattctcctcggtgttatctacggtctccaggccttgatcttcctcgttcgacggaagtgggaaatgattggctggatgttgatctacctcatggccattcccattttctcctttgctctgccactgtactcattctggcacatggacgatttctcctggggtaatacgcgtgttatcaccggagagaaaggtcgcaaagttgtcatttccgacgaaggcaaattcgaccccgactccattcctaagaaaatctgggaagactaccaggctgagctgtgggaatcccagacgtcgcgcgacgatcggtctgaattctctgcacactcctacggcacccgactgcctcccttcccgcagtcagagtatgggtaccatactggctcgcgcccggtctcgcagctcgacttgccccttggagggggtggtactcgttactctgctgccccatctgaaatgatgagcagctatggcatggaagacctcagccatctacctcccgatgatgagattctcgaagagatccgcaagatcttggcgactgcagacttgatgaaggtctcgaagaagaccgtcaagcaggaacttgaaaggcggttcgatgtcaacttggatgccaagcggccgtacatcaattctggtaagtcatcattcaatcaatatcgtaatggacacagctaacagatatatagccaccgaagccgttctatcaggggttctttgaacgatctatctatttacaatattccttttttttttcgtcttttcaaggtgtggacatagttcttgtgacaaacatgtgttattaattatttctggctgtgtcttgatttttttctttttacaagcgaacttatgcatggatgagagctttgcgcagcgggtttcttgaccttgattctttttttgaaaatgtcgccattcgcctcataaactatttatctgtatccttgaaatcgataattcccagagcttacccctggtgtttggttttggtccatgtgaattcgtacatcgtaggttttatattaatatatactaacacacttttggtctcatgagaccacagatccgttgtactagagaagttgcggggtgatattattcggctgattagagtcatggtatggaggagactgcaaaacagcaagtgaagagacacttgagtgggcatatatgcagagctatgtctggactcccaaaccttcctaaaacctatgcggtggtgacacaaagggtaattgagaataggtgatgaagcagtaatgagcgatatgaaagaaatgtcatcagaaattattgtataactgcatccttttcgcttgcactgcactaatgtgcggctcaaacaaagtctgtgctaggtcaagtcgggaagtagcggccccactttgaccgataaccttggaaggtacatatcaagacgacaaaatggcgacctaggccgttcacagtacgaccaaaaaacgttgtcatcgcggtatacacctgtgtacatgaattcttataaagccccccatctctcacattctacttcttccctctttctctcttctctttcacacccttcgtaagttcaactaacaacaccccctctacctgcattggacaactactgacatttctttacatcaaacaggcccggtgtaatctacaggaaactgtgaattactgcgaggactacagcccggccgcttgttgggactttctatctaatcgaggcttggagcaatccaaccctcgattatgatcatccgattgcaacctttcccaaaacaatgcttcggcaatattgggtgcgggccaaaacatgtgggcctatacgttcttttggggttccatgatagcggcttggtgagtattgtagggctcgtgggcgtgggattacacatcactagaacccaacttgggagccagtatgtgtaaatggcctgtttgtacacgcttcagactcaatatctgtcgactttacgttatagcagagccgaagatcaattgcctagctaggtaagttctgtttctgcttgatggaggtggtttcaatattccttcggtcagtcatgttactggaatacatttctcaacattaatataatagatatattttagacttctgttctcagccaagcgtggccaccctttatctagatttgaatgaagacattatccctccactggctcaaccgtctttgccatcccaatcaatacttccagccattcagtctcctgtgttgtaaaggcctttgccgcagaatttgacaagcaacatagattgctctcctctagttgccacgccgcaggatctagattttcgctcggctcctccataaacatgtcaaatcttccaacccgtttactacccgcatatttattctcatacagccaaccattgaaccacacagggcgctgctcgcggtccaaatgaagaagctggggggcgcagatagtttggtctgactcgtggccaggcgccattttgcgtacttttttcactggaacaccctcaggccgttcattagtggcgttgacactgtcggggacttggactacgcccatgactccagatccgcccgggtggaaggcataggaagtatcaccagcgagctcccatccaatccaaaaagtttccttatcacctgtgcagctctaaggattagcaaataaaaaagggatttgagaaggtatgtagtgaggcgcaacgaaccgaagaccatatcataagtccctttaatgtccccgccattgccatccctatctggcccattcatcctgcatacaagcaacaatgcgacaaagtgcatccacttatccacaacaacgactcccgattcttgcatatgcccgctttcaccggtccacattctgctctgctgcacggattccgaaatcggcggcggcaagatcttctgcagccattccctcttgctctctggcatgatcttcctatctctgaagaaaagggcgcccgtgcgcaagtactccgggtcatcaaatagtaactcggggttaatgaagaatagcgagtcggcgtcaatgaacatgacttcgcggaaagacgagagaagcatagaaaagggcttcccggcccatccgttgagctgccaaccttcgtcattaaccattacagagaggtcacgcgttgtgacgcctgacagagcttcaagcttcgtgcggaaatcttcattcaaatccctgtcaccgaggtacattatctcgatggggagatcgcagcccaggaggcgaaaggaagggatggcagccagtaggtaaggcgcatggctattgcccgctgttgtcacgatgccgcggcctccatggcgcgacgagacgtgcaagctcatgtggtctgcaaagtacgggctcgtccacggaaacaacagtgtagcgaatttggtgacaaagtggcggtaagtttcgtatttttgcagcgcctcggggaatgttgactcgctgaacgtgtcgcgcatgtgggtgataatatcgtcccgcacgtaagtgtgatctctgttgttgacgaggtggacatcctcccaagcctcgaagaactttttatatgcgcgtgtgcgcaggccaagctcgtgcagcctcttctcccctgtgctggttactggctgtaggagctctcgtgtgtctgactcgctgggaatggttgacagaaggtagtcaagagcagcgctagagatgtcaagccctagattctctggatccgtctttttgtcggtgtgttcaacattatttgataatgattgcgttgagtcttggtctttccctgttgcggagtttacgttttcctgcgactctaatggaatttgtacagttgatttttcatccaacatgtcttgcgacgtcgaatcatgtacaggtgattccgcagtcctgataccagtaggccatagttgccaaagtctgcccgtgaccaagctagaagtcgatttcagactcttggggcttgaatctggctccctgaggagcagagatgatattatgaaccagccagcccctaccgcaaagatgaagcgaatgatccgaaaaagcatgcgttttggtcgtgtttttgctttgaacctcggatgtgacggaggaaagcggccttctttgggtggaattgcgtgctgtgggagcatgatgtggacaacagtggaagatgaggtatctattttcgctgattttacaaaaatatgaaaaggaaagacagaaataggtccgtggacaactctgaaacagaaaggacagcgcgttgcgttctatacccctttctagttagtgttgcccttacctccattactttgtaccaactttataaattctcgcccttctttgcatatgaataaatgcgaggctcttcactgggaattgtaagtacatatgtagtaacccctatcaaaaatggtttccctttgttgctgatgttcaaaggttgaatggtgtctcagtggacccttcgggtacaaaggaacctagaatgtgagacagtctcagcattcatagctaggtagtagctatagaggccatatgtcgcctcctgtaagtagtttattaactaactactaactaattactaactactatgtagttccggtatgtagtcctggtatgtagttctggtatgtagttatgtagggagcaatgtagggataatctccgtagtgtagttccgtcgaggtccttgattggtccgagacagatttccagtttgcaagccggcttcagttttgatctctcgttaggatattaggtggtggtgatattcggttatgctattcctcgctcttcgtataactaagtagaatcacgtgtggagccagttgtaacgagtccaacactttattctgaaacgcggacgaataaaggctcggaagtcattgactttcctgctaaatactacatctacctctagccctgcaggaggaagagcgatatctcgttcgctgctacttcgcttagattagcaatccgaagcggacctatacagaatttccgctcacctacgtggtattatagcacaccaaagacttgaaaaatctctttgagtgactcggctccagcgatacagttttgtccctaactctttatcaagtctactcctgttcaaactacaaaggatgataaaagaggcaaagaaaacgtgaagtctttatgactcgcattgtttcctctctgtcaatcttctttaaatttcactaatctggtttctatcgacggaaattgcataaatagactcgatcgcaccctcttctcgtcaagttcattcaaagcatcatcaaccgactaaccacagaatacagtcccctacctaggtttgtagacctattcagaatcatgccaatcttcacatggaacgccgagcatcagtttctgcacgtccgcgaccaatttatagctaaagtacagctcgagattgatgccattatgacccgcaatgagacttcgcccttccgcttagccctagcctatgacaacctcaccgaccttatttacgaggtacgtgttgttgaaaatgctagcgtcactatgtatagggagatgccacaatgccgtaccgtgcgcgatggacatggctattacgggtacaattccgagttcctgtggaagatccgccagcttcagggccatttagttgtacttaagaatagcctccacaatatatttgacgactggcattgtatttcgcgccaggtcggggctgtgggacagtgcttagacctttaggtatatgccaatttatttcatcgcaggagttttactcaaatgcgctagcgcttttcgtagtattgtagtcaatagtaactcgctcgtagactaagaagttgtttctggtgctcacagatatctcgagtcttcaagttctgctaaattcctaagctaaagactagtcatttattgctaaagctggttgccaatattctccacttagtcaaggggtgtgaataccaaaaataataatgctgtgttgaagccaacaatctgcactgcgctcttgacttcggtttgataacgactacccctagtatggaggagacccaaagtatttacagggtattgttttgagatacagtaacatatctattacgctaggctatttcaggttgtagttgcaatatcaaaagtctcttaaattcaaaactggacactaattaaacaatcactgattgtttttgattacgttgaatgtttccaagtacatcaatgaccaagagcatatcaggcaaatcgtccattggacgattcagcccactccgatcagagaggtaatggaagtttgttctatggctcttctgggtatatcgatttgaaagtatcttcttcaaaccctgtacccatgcaacataccaatagccctcttttccttgattaaatcaaaatcccactgcccacagcaaggagcccgaaggccaaacaaggatatcgcaaagcttgaagctccaacttgtttcttcgcttcttcgaaaaaaagcggggttgcatggccagttgcaagcggtatcacacagtttcctgcgtaatcccaaaaactccgctgaatgcactagacagaaataaccccaagttagtagcgaaaacaaacagactgaataaggggactcacctggagtttagccgacccgccagaactgggattgtgcactcccgtctgacttcaggtcttcccctaaaggttctgatgaaagaagagcgcaggtaagagatgatgacaaccacagactcgtaagactggtaagacttaccttggacttgtgtcccagatgccccgcaagacgaaatggcagcatgtatcactacgtgcataccgacttcgcctcaggcttccaaacccgtagggattgatggtactggcgaattatcccatctgcctccccaaggttcacagcacggatcctccaaaagagggtgccgacttggtccgggcgtttttgacaattattctaatggaaggagactgtggttagaaatggtaaaaggccactggctggagaactcacccgcacatcaccaaggctgacagaacaatcaatgagagtccaagctcaatgcaggtactttgctgccataacgaaggttctaagaaataacaagtcagtgaaacgaaaacgattgtcagtagtggaggaattcaccccacatcaccaaggctgacaggacaagagtccacgcttagtacaggtacattccgtcatccaacgaaggttctgagagataacaagtcagtgatggggaaaaaattgtcaccagcagagtagagggactcaccccacatcaccaaggctgataggacaagagtccacgcttagtacaggtacattccgtcatccaacgaaggttctaagaggtgataagtcagtgatggggaaaatattgtcacgggtggagaacatacaaccgctaccgaggcttggggccctggcttaggttttccgacgaaggcactaagaggcgcgagtcagttataaaaaaaagtatgtccaatctgcaagtgggacaacataccatgccggttcgatatttacaggagaccctgcagtgtcccccgtaaatctctaaaggctgttgaatgttagcagctcatcttgaccgaggaggaggtatgaggctcacctgtaccactcccatgaaagctgtgccagattgggtccgggaagcttgcaagggaggaggttgaaaggaggaagtttgaaagaccctggggggactttatatagcagacctgacctgtgcaacttgctctggcctacttaggaagtgatagccccactttttatgttcgcgaacaaagaacaaaggaaataagaaagtactactaagcctaattggggtgggaggtcgctaggtggctgggagtatgtaaaaaaaacatttaccaccttccatactatagcttgaactacagagtacaaaaaaaacatttcaatcaactaggactctaggggtcctagcagcttaccagaatgtaggtggatatcgtagggactgaaataatagctgttcgatcattaatgagacatgtctccttcaactctatgcaccactccttatgctgaccggtgaaaataacccaggctagtagagttactacgcctgtttatttctccatggtattcataatgtaatgccccaatacacgactctatcaatgtgaaaaatatccaaggtcgggacccgtcttcaccgcgtctctctgagcaggtccatagtgacgtacgatattttgcacttataatctggagcttcctcgccgtctggaccaagctgtcttttttcttacgaatacgatagttccttgagtgaacatgatccagaacggacaatatatatttgactgatgaaacctcaaatagggataaatattccacgaacaagtcagatatatgccctcttcacatgttaagtataactaagtgactggaacttgcggtctttacaaagcgagagcgatcgcgatcagataccctgatcggcacatctccatcattatccagggcggggggaacggatgccagagatgacatgtgccaagtggggctgtcaatcttttgtctactccgtacagatgtcttatatcagtaaccgtacgtccaaacccccagcgaaagctacatagagatccgagcgagttatctgggatcatctctccaaagattataatctacaaatccatcagcaaactccaaaccaaataaacagccaaccatggataaccccaccccgcaaccgaacccaaacccaaatccaaccgcagacccagaaaacccaacagccgaccaacaacaaaaagaagctctggcagcctttaccgcaacactccactcagtcggaacaaacctcgaagcgccactccgcgaccgcgcagcaaatatccaatcgaacgcggtggttctggaaagacaagaagccgagctagcagagaatacgcagcgactagcgcggcagaatcagcagtggattggattcgcggatgagacgcgcgacgggttaaaggagatcggggatgtgcagaactgggcagagatgattgagcgtgatttgctagccttggaggatatgatggatgttgttgagagcggccatggggaacatgggagtgaggatggcgatgaccggggggatagtgatacggaactggatgacaacgcaagtgaacagaatgggaatgttgatattgatgctaatgggaagaacgtggatcgacgaccgaaaggatggttgcgatggtggtgatggttgtctttgttcatttgatttgttgttcttatttcacatatatatcacgcgcagggtatcattatggattattctccgtcttcttctccatcctcttcggcttctccttccaagtattgtttccaggggtctagtccttcggtatcctggtattcattccattcatcccactggcccagactcatcaagtgtcgcatagtcggtcggccatgcgggcagttccatggtttatcaatagtacccatgttccgaacgactcgttccatctgccggctagtcaaagtctttccgatcatgatacttgagcgacaagcgcgcatagcaaacattttgcgcactttgcttggccgtggtactgacgatccatttggcgttgaaattgactctgacagcaacacgatcagttcctccagatcccgtacaccgaacaccacttccttgcttagcggtaacgagaccagctggcatcgacgaccgataggctcatcgccgctttcgtcgacagtcacgaggaacccgtttttctcaagggcggcgcgattctcaaggacaacctcttcttcaacggcagtgagatcgaggcgttggggacggacgagtcgctggttttgcaccacggtttcagcttgcaggcgctcgaagttaattttctcatcagaggcatgctgatcgatgatgaagagctcatcttggtcttctcctggacggactgcgatgataaagcccaagttgaactggccgattatgcgcatttgagcgaaatcgttcttgcttacaatcaacgaaagtttgtcctcggctgttttttcgccaagatcagtgacttcctctctcggtttcttggtaccgtctcgcatggtcttttgcaatgtgataagttgggattggagacgtgcaatagagccatctaccgtaccgataagctgtatagtcgcgtcgcgatgcgcagcgcccttgctcattttctttgcacggttcgcgctgttttcttcgggaagtacagcagtctcttcggcttcatgaatcagccgttgaactgtagcctcttcctgcgccttcttttgagcttcaccgatattatcatctacggcagtttccttgtcttttgcctcggtgttttcgggttctgattgagctgcactttggttgggaacgtaatcagcattctcgggcggaggagagccctcctcttcagactcttcttcagcgccttgtgtgtcctcaatttcacttgaagggttacttccatcttcctcaatctgatcatcttcactagcagatgcctcttcatcttcttcgtcaaccggctgcgacccaggtgcagcaaaagatttcatatgatcactgaagatattaggacgtgatggtgtgtgtatcagtctcttccgccggggctgcgctctgattaggggtggatcttctgcaactcgttttcgtggaagaccactaccgaccatggacgttacggttcggttgccaatagtgatggtagcaagttcggcaggttctcgtcgtgggcgcattcgatcgaaggcattctggacaatgctgggaatttcttctgggtctccacgagcacgagatggagtctcgtcaggagctgatggctgggatgatggttcatcggagataagggctggctcgggctcttcctgggcggcttctgggacgaaaagttcatcgtcggagatcgccgcggcaggcgtttctagctcacttggggctggcgtcgacatcgaagagcgatcagttgcagcacggggtgttctcattgatcgagccggagatggtgtgacttgcgtccttcccgtgcccgcctctgagctcgagaaacgctgcatcgcactctgttgactcgcccccgaagtctccactgagctttctttcgtccgatctcggcttggacttctaattccaccgttttcattcagctcccgagcagtgacgaaccctggaagtgatgctagtggttgctgttttggcaaaggcttagatttaaccgatgactgcggcacagtttgttccgcatcaccaaagagttgagtaagagaaactttgagcgattcaatcatagcccctgcatcatgaagcaaaatttggcgcttatcaggcgagacgttgacatcgtaagcgtttgtatccatctgaaagtctgcgaagataaacgctgactgtgagacattgaacgacttgtaaacctcgttgaacgccttctgaatctgtggcaggccacatggccgcgagttgacaaagaacatctgacgatccggagtttgacggccctcgccgaatacaggacgtgagatatgccctcgcacctgaattttactcagttggtcatcgcctatccgtttcgtagccgtagaaggctcaaactccagctctagatcgagggatatcagggcagtcttcgcgccatacacattggcaatattttccttggtagtcttatttccatttgtcgaaaagaccaccacgttccgtgtcttaccaacagtgttcctgacactgaatcggactccagtgctgatgcatgcataggcatgtaagagattcagaaccttcccatattcccgcttgatgttcttctccaattcccgccgacgcactggaagccgcttgaagatgccttcgaccgacgcagtcgttcctttctgtccagccacgatctgtgtctttcggagtttcccagattgttcaaagtcgagtctattcgcgcgaggaacttgcttttcttgtgccgtgacgatgtgaaattcagccaatgcgcagagtgaggatatcgcctcgccccggaaaccgaaggtgtgcaggctcgagaggtcatcgtacgacgataatttggaggtatagtgtttcaatgctaagagaagagtacaagtcagcttgactgcaatgcaccctgagagaaatgataactcacccacgttctcatagttctccggcgagatcccgctgccgttatcttggacctcaattaggtccagtccattattcttgaatcggacctctaaaacccccaaatcatcagaaatatgtcacaaacaatatgccgagctgtttactcaccgattgtcgttgcgcccgcatccagactgttttcaacaagctctttggcgacggagcacaagtcaacgatgacttgacccgattggatttggtgtacctaattaatgcgctggtcagattgggacgtcgggaaagacatcagattgcatacagagcgggcctcaatggcttggattgttgccatgttcatcccatgatgtctacagaggagaagttggcacgcgtctcacttaacgcgtgggtttgccaagaccgcggtgagccagttgattatgacaagctcgatccatccatggattcgatgacgcccctgatgttttatttacgttgcaaggacataattgaatttgttcatttgcgaattggatagaaccgcaactatggatataaatcaaaatggtcaattaggagcaacaatatcgctcttaacgcgcacaatcaatatgaaaaaactaataaacaccgaagcgatctggcagcataacaggcgcaaccagagtccaaagatagatagcatagcagacccaggcgctgacgatcttcacccagctggcccagtatgtgcggcccaccggtgcgaaatctgtcgtggtctccagtgtcagtccctggactaacaaagtggctacccacgttgtggcgaggaagaagatgatgtggaagagcgagtagttgtattgtgttgaactacgctcgtcgtccttcgtggtttcatagtcatcttcgtcgtcactttcatccagggcactagcaggaagactgccgctctcaacagcagcccggagaacttcagcgcgcatctctcgacgggcatttggttgttgagtcaccaagccgtgctcgttgtcatccgtgcccagctggatgtagctgtggccgcccttcgatcccaaggcaattccttgggtagcagcgcgtgtggtggtgtatgcgatagtcagcatagtgacaatcgcaccgaggacgatagtggcagtcctagttccgcgggaccggatgagggggttgcagttcttgtcatccggttccattgaaacggcagacatggtcaggtaggtgcagtagacagtgaccattgcagcctgagccagtcctgcgcgagagttcgattcttgcactgctggttggacagaaacgaaagagatgatcaaaaacacaaccaggttaacctgtgacgagtcagttaggcgctaagattggtggtgtgggatacatacggtgatagcagcctggttcatagagcaaccgctcttcgcgaagaagatatacatcaggatggtcatgaccaaagacgccaagtacatgccgagggtcgaaccaataagcagaccgcgccacacgcgagagtcgctatcttcgatcttctgcaggcatagctccgcccacgagtgcgcaaggtccaccagaaggatcaaacccaaaagcaggaagagcatggcgcagaagaaggcgatgtagttgccatagacgaagaagaagggttcggggataaagaaagacatgacgataaaggccagccagaggatgaccttcggaccccaaaatccattttggagagcggcgcgagtatctttcgagcttttgacgccaagaagcaaaagggcgaggagtaaatggaagagaccgagggcaaagttaatacgatggaccgcgacccagccgtgacattccttcccgtcgcatcgaatctccatataatccagtgtcagatgttgcaatttcttcagggcccatggcgtgagcataatccaggagagtatagagttgatcaaaaggatgaaggcataagcgattctcgtcgccatactgtctttgttagtccgagatcctccgcactaggcagttgagatggtacctgttttgaaactttccgcaggcgctacagactgcagagcatgtcgctgctccacagcatgatgccgtgactgtcaggatctgttgaggaagagaatcaagttagcaactgtaacatggtgaactggagattgggcgacaacatacagaaccaacgctcggcacggccaacagcgggatggaaaggagggcacccatattgggagtgcgtgtataatatagcccactgtcttagttcgaatgtaaaaccttggaactgaaagtagatccagaatcgacaagagtgtggagagaggcaggtgattgaagatcgtatgaagccgccttcgtcatgaatgttacgtaatatatccaaatcgaaatacatcacgtgccaagtctcttttggcctgctattttaggattagcgccccgctatctagcatgaccctcggcatcatcatcaacattgcactagagggatccaaaaagtatgacattcgagctagttttcaattggtggaatgatgacctggaataaaagaaagggattccattcgttgagaacattgattatttcaaacaaaccttggaagctcggtaactacagagtactccgtatagatgagatagtatatcatgaaatgtatatatcgaggacatcccttattgttgtaaatacaatggacctatttagacaaagaaacaacagatcaataaatcaaccgctctctctctgctcggacttgattggacttgactacatgtatattcctggtgatataaaaccgttggaaatcaggcaacataaggctgtaaggcatccaatacaaatccttatcgcgcgtggagaaacgcacttggccgtgcactcgaactatgacgagtcccgattcgcgcaatttcggggaatctgacggattgctgtgttatcaacgcgggatgcaacgtagaacttagatgacatagtacatctcttactacatctctatttctctttttacccctcctcagattccttatagaaatcagtttattctcctatttgtgcatctgacgtggagcaaccttttcttggcacttgcttgacggctgttccgaccacgcggcctccgggatcatctccaagtccttacctaagtgtaagctcctgaaaactcccaagtggccttattccttcaattcctcctatataactccattcgctcttttcacccttcttgtccttcattccggggatgtttctcccagtgtgggcctcacatctgtttacctagggcctagagcgcttgtatcgcacaagatatcaaccaaaacgaaccgtagaggaacgacatcatgtccggctctctacaccgaactgcccggattatttctgtcattgcggggacgctggtcgccctctcatgcggaaccaatgtgcgtgatatctccggtctcatccccattcaggaccattaaggttaacccatcttagtatgcatactccgcgtgggcgccgcaattcgcgcagcggatgaagctctcatccaccgagagcaactttattgtgagtaatgccatgtccggtgccgggaaacgggttttaacagtgtctagggtgtcgcgggaaacctggggatgtatgctatgggaattccaatgggattattgacagatgcccgcggtccccgacttgtcgccctgatcggctctgttggcctaggcctgggttacttcccaatttatatgggtatgtgttgaggttaccttgtcggaattgagcagctctaatgtctgtagcatatgataatggccaaggatcgatgccggttgtgttcctatgccttttcgctttccttactggcatgggcggttgctctgcctttggcggtgccatcaaaacaggtatgttacactaagtaatttgcttaatagagttaacctaatgattccagcggcatcgaacttccccgaccaccgcggcacggcaaccgctttcccgatggccgccttcggactaagcgcgctattctggtccaacctgtcgactctcattttcaaggacgataccggccgcttccttctgcttctagccctcggaacctcgattctgtcctttgcctcaatcccattccttcgaatcctccccagcgagccgtactcatccatcccacatggcggacacgagtctagcgaccttgataccgtgctagaggactccgatctacatggctctaccgcttttgatcatgaacaataccccgtgcatgcgcggtcgcactctgttgcatcgaactcccaaggcagggcattcagccatgccgatgagactgccaacttggtatccaagcacgaccgcccgcgtccctctttcgatacacttgacgatgacttcttggatgaagtggccattgaggcgcaccaaactgatatccgaggtctcgccatgctccgcaaagtcgagttctggcagctcttcttgaccatggcactcttgtccggtatcggcttgatgaccatcaacaacatcggcaatagcgtgaaggccctgtggctgtactacgacgacagcgcaacagacctgttcatccaacaccgccaggtcatgcacgtctcaattctctccttcggcaatttcctcggccgtctgtttagcggcatcggctctgacctactagtcaagaagctcggcatgtcccgcatctggtgtttattcttgtcagcggtagtctttaccctgacccagctcgccggcaccaccatttccaacccgaactgcctcgtcgttgtctccgccttcactggaatcgcttacgggttcttgtttggcgtcttcccttccctaaccgcacacactttcggcattggtggcctgtcccagaattggggcgtcatgacactagccccagtgttcagtggtaatgtcttcaatttgttgtacggtaatatctacgacgcgcactctgttgtcggccacgatggcgaccgcgagtgtcccgatggattgggctgctaccgctcagcctatttcatgactttcgtttccggcttatttggtatcgctgtttgtctgtggaccatcatccgggagaggaacattgataacatcatgaataagaagatggaccgactcgcctgagttggataatctaggcgcaatagtacctgcatggcaggcatgtgctcatgaattgctttcttgcttgcatatctatctcgatctgtttgcagtttgttatgacttctcacagagtacatttcatggatattatttgggtcctcatttctaccgtttctctataaacttgatactttctttgcctgtctttatttgagttaccctaccttatacgccagaacctggccaatttcattattgtacatttggagaatatgcgctgctgttcaaccccaagtagttactaggctcgtccatgttctactcaacccagctcttagaaccactacgagcaaagattctgcatgacactttcattcccgtcctaacatacatatagaatatcgcagcgcagaaagcgagaatgttgcctcaaataaatcaaaaacagaaatcccggcgctcagacacaaaaagctgacctaacaatcaaaaactgttgcattgcattgctctattaaagcagcaaactaaaataatgatcattggaagcgccaactagcacatggagggaaacatcccgggcaaaacacccagacgacgagacatctcccagtttgatcaccgattcgatcttccagacgcttgagttccgcaagaagagaaggatagggaccaagtattgtattagaagcatagtggaagagttcgtacagcgcaccgcaaggaaagcaaattaacaagatgtttggagaaacatccagacataacaaaagtaagggaaaatcgagaccgttcaatagtagctttttttgggtaaagttccagccagtgatgacgaaggagccatgaagggtatcaagaatatcagaggttggatgagaccagcaaacgtaatgtagcttataagcttgtactacccgtggaccgatgatgaggagaataagcaggtggaaaagggctggaaatagcaagatgccgcaagatctaaacgctcttgggagacttgacaagtacatcctcgccagattccacaacatccgacaggcggatcttttttgcgagcggctcgccggactcggcgtcaccagcgccgctagaaccgagctggcgctcgagatcgctaatacgacgcttgagatcctcctcgcggcgctgagcatcctccagagaccgtctcagacgaacctcggagtctcgtacaatcatctccgaccgacgcgcgctggcgtcactctgctcgagttccgtcacgcgaccgcggaagagctcattgacgaactcaagttcactgacgcgtgtcttcagggatgtgtttagagccagaagactttcataggtgtggggggaatcgagttggcggtcgactgccgagggagagggctggcgcatctggcgggaggggaggccgctggaggagttcatgctatcgcctagggtgacgctgtcgaacatgtgctgcggtgcgatattcgagttgtgcgcgtgcatcgagccaaagccaggtgtctcggtccgggaaacgggggagttggaacgatccgaatgacccgaggacatcttgcgcgacgcgcgacggtatccatgcgagccgaggggaggaggagttcccgcctcagatcgcggcggaatgccattggtatcgacagggccgcctgactatagaatcacagtcctgattagcgcatgttcttatctaagataggtgggattggattgggcgtaggggacggggagaaaatttttttgatcgcgaactcaccttgcgcttagggccctgaccagtcttcacgcgattgcgacttttaatcacatccgttttcaagcttatcggacgaggtcgaccatgcagtttcaggaacagtccacatgcgttgcagaggactgaaccgagttcgtccctacgccacaggggcgtggtagaggtgccgcaattttggcaaacaggctgtaattgaggtcgcttgtcgtcagtcaatgtggtcgccattatgagggtatagaagtgaggaagaggaagaggatgataagattgtagagatttgagtcgataaggaaagggaaaaagcgggtgcacggatcgagtggcgccaagactttcgataactcctcagagataagacccagcgcgccgataacacatatttcacacttacaggtccactcccttgtcctcctgtcgtagccgctggtgacgacgtagcgtaggtcatatttgccatacccatactcgtatcactggatgagctaaaaatgggaggggaaatatatggattagccaattgattcgaattcttatgaggggccagattactgctctccaggtgcccgagtgaagattacgcaataagataggtcgcccaaaggtccacgggtggcttccattgaggactggtatggggtatcaacgcaccgaagattagaggttggtgccgaagcgaccgaagccagtgctgcaagtccaggaagcgaggtgctaacagaagagcctgggtatccgtcgctctcgcctgagccgaatttggtcacgctcttgatatccggcagtgtcgtggaaaactgtgtcgatccgttggacgcgtgacgggtcgaagaattgtcggcggacaagtcgtaagggaactcacgctcctgcgaagaacgggatttgatagccgggtcgatgggcgacgcccgatagagggtggaagccaccgtggagggggaaagtgggtgttgattgaaatccggcctcaaaccgaattgaaagagaaagggtaggtgtcgaacgaatcgcgcgacgggatgcgaatgcgattgggaacaacggactcggaacaggactctaggtcaatgggtctatatcaagacaattccttcagtgatcaattcgatatgaagttccgagcagtaatgatcgataccggaaaggagcgagaggcttaggcccgacaattcttgtgcctgaagaagtaaataagaccaaagaacagaacgaagacttaaattaacgacatgatggccgaggattgggggtaggggttgggaagaagatgcagaattgagatggacgataagacgcgataataacaatcgggataacgattgccccagtatcgactattatttgatacggcatgtcaggggcgtcacgtttgatgttttgtctcacaaagaatgtatacaattcaattaatcagctcttcattctacgccacccagcctcttgatatctggaagcgcaaaaaatgaatccattccgcattatctggttcgcctacaggtgatcaacgggttttatgcgtataatttcctgcacgagcggatattgccagcgtggcggatttagatttaccaacattgatcgtatgtattgaattgacgtcccctgaatatcccaattcgtcatagaggggtcccatatggagatcacggtgctagccaagcttcaagggctttagagcacagaataagtcgatgcatccatccatctaagaccccttgcgattagggggtggagaccgagtgtggcggtgcgtaatggtataacggttattaactaggtggacctgcccatcccacgtaatttaccgcgttctgccgttaattacgacaccgcctgcgtaaattaactgtaacaatgttttcgggacgcccccttgggcgtccggacataggtgaccacttatttcaaccgccttgactctatcaactctttattctatccaccagcggtcttttccttcttctgttctctgtgatggattaaaaattgtttggtgtgctttcgttcttttgccggccttcctctctttttcatacgggttattttccccgttttcatcttccatagatccaaccaccctcaataacaatgccgaagactcgtcctgccacttcgggatacgcccggctcgcccaggccgaagaggaaagaggctacctccacgatgagtccgaagacgaggatgtcggtgctttctcaacagcgtccacctccgctccccgatacgcccccgtctcctctagagcccagatgcaggcgtccggtctccacacccccccagcccatcgacgcagacacagtggttatactcaaggccgtcggaactccggagtggatatcaaggccatcaatgcgcggctcgaaaaatgggcggacgagattgcctccaaattcaagatcaaccgtgtcaaagggaagagctatgaggaagagaaactggagatttaccattcagtattccaggcacctcccggagttatccccgtgaccgccgaagctctcgaatcggatgagtttgagggtcagcaacggcgagcccgcgccgagtacgaggagataattgaaagtgtgcgtcttgcaattgaaatggacatacatcctcggatgatctcgcaaggaagctcgggcagctactttgctcgaaaccctgaaggtaaagtagtgggtgtgttcaagccaaaggacgaagagccgtacgcctcgcgaaaccctaaatggacaaaatggctccaccgtaacttgttcccctgctttttcggtcgcgcgtgtcttattcccaatctctcctacgtctccgaagctgccgcatacgttctcgatgcccgcctgcgcacgaacctcgtcccttacaccggtattgtacgactatcctcgagatcgttcttctacgatttctgggatcggagaaaggcatggaaaggcaagaaagttctgcctcccaaggctggcagtttccaagtcttccttaagggattcaaggacgccaacattttcctccgagaacatccctggcctgaccaggtgaatactggattccgcacctcggatgctccgaagcgcaagaagcggccgtggaacgaggcctgtcgtccatcgggggcacagtccgacgatgaggatgacgacccgggctatgtgccctcgcccgacggttcgcgtgatgaaagtgctgagcgccggttctactggaccgagaatctcaagcaatccttccgcgaagagttggagaagcttgtgattctggattatatcatgcgaaataccgatcgaggtctggacaactggatggtcaaaattgactgggggacagagcaggtttctatcgtggcagagcccccaaaacagactagcccacagcctaagcacgatgaagacgagcttatgcccccagctcgtcctgtttccgtgaattcaaatggcacttccaatccctccttccacccttacaggcgacatgaaacaatgatggctatcagtcgcacgggaactccattagcctcatcggaacagtcagcttctgtccagcttggtgccatcgacaacagtctttcctggccatggaaacatccagatgccgtaagttttcgaatacgcgggtagttacttccaacactaacaacttgtagtggcgcagtttccccttcggttggcttttcctaccagtttccttgattggacagcccttctcgcagagaacccgcgaccatttccttccattgttgacatccacggcctggtggagcggtacccagatggctttgcgtggtgtcttttcgcaagatgatgatttcaaagagagcatgttcgctcggcaaattgctgtcatgaaaggccaagcctggaatgtggtagaaacactaaagcaaccggatcatggcccgcttgagctgactcgacgaacccgcgtctgtgtatgggatgacttagttgacgtccccgttgctatcccgatgcgcgcgccttccgcggacaagcaaaggaaccaacatataaggaaccaacatatgaattacgaccctgatgaagaagagatggatattggtgcatccgcatcttcccaaccaatccccgaacacgatttattagggttgaattcgtcgctaagcgacctccccaacccaaaccggttcgaacttacccgtggtcgaactgacgctgacagcgaacgtgctgatggttctatcggtagccctgcaactataaatgacttcggcggccgaaacactagaggttctctagacggatggccttcacactcccgccagcacaagaatcgcaaaaacggcggtgccgtacctttccgtgttcctcatgtcaacacatttggcagcgatgatctcgagggtgaccttggctatgcagttgcagagggtatggaaggcaaccagcgcaaggtgattgtcgagcgcctggaagccgtcaagagcaaaaatcctgttttcacctggtgctaaggttagattatgtcgtactacccttttcgctcttcgctcttcacttttcacttctccacattcctacattacttctctttttcatttaatgtgcagctattttctgcgacgttgtcttctcggggtatttgtcgggtccccgtccttcgggaaatggttcccacttcctcttcatgattcgaccgtgccttttttttcctgcgacatttcacacgagtcctttgctggacatgctcatgatttgggagatttccttgttgtatatagacattctttggctgttggggttaccttaggctatggcgcattgattgggcgatctgcctcatgtagcatattgatgagacctaattacatgatacctttatcgtctattctttgagtcaactataataaccggttagctagtactagcatgtgactgcagcatgtagctaggctggggtagacgacgatgttagtcactacaccatattggatattagatgaaggaattcacccaaatgcctacataaaccaaagtaacagtaagtggtttgtggacttactccaacacatatcttacaagattgatacttcgttctgttatatattgtgctgtgacacagagacgttggtttacacgtttgaaaggtatcatgtcgtgttgggaccatctgcgaggacctcttgaaactgctatattggattcagaagaatctatcgccttaaggtgagatctctgaatggatgcattaatatctccctagagatgtctactttatatccaggcacacacagcttattactctagcctaggtaaacaactcaaagccacgcgtcttcggctacggagatttacacccctcatgtattccgtgggacttgtcaagtggcaatgagagccacgacttcaggaacgtccacgagaaagcccagtttgttgtttgatgcagacctacatggacctcatacatatggtaatgttatggtccctgtggtaggtgaagccgcatgtgctacggcaccctctgcctacactgtctcgtgggggctacggcgagatggtggtcagagggatgggcagaggagaagaaaaagagaagagaatttgggggggaagggacccttttatacccccaacccacgtgccttcccaaagtgcgataccctccatcgcaccttcctggaatcacaaatgtcacatcggccatgatcatctttcttttccatatgacctactcatcggacctggtccagctcactgttctatttagggtcaaaccgacctgccctccttcgcatggccggcttagagctgagagtcaacctctgcgtaaatgggcgcagtggttctatgacctgaatctggctactcagtctgcctagtgtgtaaagggtttaagaattcgttcattcgatatcgacccataagagctaatattccacgacctaagcaaatactatctatgcaacaacattcgaaaatattgacatcttcaaacaactcccacgtgtgtatgtagcatgaagtaccttataactatgcttgcaatacattaggctagaaatcgacacacctcttccaccacgagaccgagatcgaagttctgcgggtgcatgagctggttataggctaagatttcaaatagctaaacctctgggtcaacgaaatgaataggtatatcaccatctctcgagggctcgctcatgccgaagatcttatcctctaatttattccccacagacttccagtaatctccctgttgatcttgatcctttagggctttgtgggtcttttcgacatcaaacatgtccgtgatcagtccgtgttgggccagatgttcgatctaatgtctaatttgttgcatttgaccggtttgccacgcaaaatcgtggatatcactttgtctttgagatcgggaggcccacggccttcgagaaccaactggaaagcagttaccatggcattcttgccaatggctgccgaggtcctttagataatcggcaattacagtagctttcatgtcgccggtggcatcgacgtggaagctactatttcaacggtcaagagttgtgctcaaaaactgcatttggatgggcctaggctgcccaggtgcgctcaggcgcagtcatccagcttacatgatgaccaggtgatgattaactaactagttcagcaccacataaacatacagtagtagagcattaattcatttatggattaaaatatcatagtcaggcaagtcaaagcagttcatttaaatcagaagtatacaaattccaatcttggaagaaagggtggctgctcaattttactcagtggcagaaagcggcaagggctaagcactaaaacggaaaatgaacgccaagaagcacgcaggtaagcgcgcgaggactgataagatcttatcggcgggtttctccgaggcacagacttcagtggaagaaggacttcgtcatttcgagttcctaacaacgcgaccgagcttgcgactgacttgagcaaagaagttgcgcgaaccaaaagacctacagccagaacgactcgaggtccaagacacttccctcgaccggtacaagagccacccacgattccttcgacgaggcaaacgacaaggcgccgactcgatcgcgatcaggaaaacgacgtgatttcccctgggaaacatacgtcggtgactgaggcaacagcgcaactagtgttgcccgtgtttctcttccttatctctcactttcaatgacgccggagatttcgcgaccctcgcgtctggaagacgcacctttcgttggccacaccgtttgcttaatcactgcgctgcgacgttagtatttgacacatgatatcaaggctcaagggtcttgaacttgattgatatcccctcacaagcaaaccctatgacaggtcaggcaattaatcaatcccaaatcgcaaccgcctatctctcatcctaaatcactcgacaccgctgcgaatacttctcacatttgagcctggacgtaaagcttgccagtctggcagaacttggtcctatatttccaaccacggcaagtgaaacaaatacccagccttgttgcctctctcatcaactgactttcatcagttttctttcacagcatcgcccaaccctgaatccgaccaaagcctatcccgggtttttcgactaccattacaaacatcatcatggcatctcatgctgcgatgctcttgaaccccaagggcgctaaaagacaagctcaaagcaatggtaagcctccctttgcttcttccccagcgagtgatttgtctcccgtgggtgccgtcgctatgtcccgtgaatttacctcggacaacactaggcccgtgacttattcttctgcgctttcttctcctgctttccctgatgcttcttcccatgtttctacacctactcatgtgaacacaatggatacttcggccatgcctagagtccttcttgacatacctgaggcatctgtccatcttgacacccagatagacactcgacccacgtctgcggatatgatgcattcggctgaatttcgtctccctactgctcctcagatggatactccggttatgcatacaaagtctctttggccaaccgactctgtttccccttgcgctctcaattcgcttgatccaccttcaagtctttcttcccacaattcatcttctcttgtcacttcttctccgacagaccccatgcatctcgaccccacggattcccagggcttacttttggaatgtacaggaaaacaccacggaaatagttcatctcctggctctcccatggctaccgcgggcactgcagccgatacacgctttcaccaatccactagtcgcacatctccaagtgtgccatcgatctcgaccccggttgtgaagccagactccaatctgacagtgcagttcaccaccacccatgatgaggacatggaaagcgacacgaaaagaagtcaccgcgagatgagtgaggatgaagacatgacctatcgacccaatttgattgaaaatgtctatggagttgaaaaacggaagaaccaaccgacgaagaaggtcaaaaccgagcatgagaaaccgaatatggcgaacggaccggtctcaatctctggaaatagcgggcttgggaaatggatgaaagaggatgatgcgaaatcaacaccaattcccactacactcaacgtggtggatttgacagcgggtatgagctgctttatttctgcggattgtgttgaaccaatctaatgtttttctagaccttgcgaacacacctaaggaagatgacgaagtcctatgcactggttcaacagatctcagcgcccagcgtgtctgcttcggcaagattgaaaacgcaatgatcatggcccatacagtccctagacccggtccctctgtttttaccgactggtcgcacgcttggccgtctatcaaactagacctgcgacgccagcccgtgaaaggcaattttcagatcgacgtcgcggacccccacggcaaagttttcggtacaattgatcctaaaacggcacaaggactgtgtccgctcctggattccgaaacagattttatcgaggtgacagccttattggatatccgaagaacctcgccgaatgaagaaatttgggctcctacctccgggctgtggcgtgcaaccctcaatatctacggccaacgaaagcacgcagaggctgtcggcaattttctctctcaccgcaacatctggctgggtcctccgaattctgtggacaaaggaactactgtgttcaacccacatgcagagagccgacgccaacttgccgccgcaagcgctgccgccaacaactccgcgcggtcacgcccagggccagttgtccgatatgaagcgcgaactgctgaagaggctaatgatgcagtcatgaagatgttcgaccagcttgccaacgcgaacattccgacgatggagccgtctaatcacatcaccacaccgatgcttcatcatcaaaagcaagccctttggtttatgacagagaaagaaaagccgcgcaaatttggccgaaaagaagaagacaataattccttgtggcgaatggaacttgcgcccaacgggaggacccaataccgcgagatcattactggtatgatttcagggcaaaagcccgaggaggccctaggtgggttgttggctgatatgatgggcctgggtaagactctgagtattctttcgttgatcacctcatcgcttgggttagctcaagaatggaccgatatggctcctgatcccgttcttgttcgccgagctccgggaattcgcaacacacgaacaacactattagttgtcccgttgagtgcagtgagcaactgggttacacagatcaaagaccatctgaagccaaactccatcagctactatgtcttccacggcccatcgcgcatcactgatttcaaggcgctttccgaatttgatattattatcacgacatacagtaccattctcagcgagatctcggggcgtggtgccaaaagtggaaaactcagtcctttaacaaaaatgaacatgttccgaatcgttcttgacgaagctcatatcatcagagaacaaaatgcggcacagaccaaggcgatccttgggctccactctgagcgtcggtggtcggttaccggaaccccaatccaaaaccgcatggaagatctcctgtccgtgaccaagtttttacggattgctccttacgaccaacgaagccaattttcccaacatgtatccaacccggtcaaaaatggtgatcccaatgtacttgcgaggctgcgagttctggtagattcattcaccttgcgcagagtcaaggacaaaatcaatctaccacccagggaagacaatatcatcacactagatttcagtgagcaagaacagcaattgcatgagttcttccgcgcggaatcaaatgtgatgatgagtgtcattgctggtcaggacaaacgcaagataggtggccggatgtatcaccatgttttgaaggccatgatgattctccgccaagtcagtgcacacgggaaagagcttcttgatattacagaccgggagagagtcaagggattatctgttaacgatgcaattgacttggaggagaacaaaccggaggacaccccggcagccatagacaagaaggcatatgagatgttcgcgctaatgcagcaagcttcggtcccccgatgtggcaattgtaatcgagaactcgatgaacctttgaatccaatgggagctgtcgaccgtgacgctccgatggctattgtcctaccatgtttcgatatcttctgccccggttgcttctctggctggaaacaaacctacgattcgcatcccgagactgagacgcgttgcccgaggtgcgaaggctggatcaacttgaaatactcgaccatcacgcctgctggctttgaagaatacgaggcccaaaaggaaagtgagcggcaaacccggaagctgggcaagaatttgggtgaatacgaaggcccgcacaccaaaaccactgcattggtcaactatctcaagcaaagtgttgaagacagcaagaagcttgaaggcgagtcacctatcaagagtgttgtgttttccggatggacctcgcacctggatctcattgagattgccttgcaaaacaacgggcttgacgggtttacccgacttgatggtactatgactcttgcagcacgcacaaaggccctcgaggaatttgccaacaatgacaatatcaaagttcttttgacaaccattggtgccggcggtgtcgccctcaatttgacttctgcctcgcgcatcttcatcatggagccgcagtacaacccagctgccgttgctcaagcgattgaccgtgttcatcgccttggccaaactcgccccgtgcaaaccttccaattcgtgatgaggggcagcattgaggagaagataatggagcttgctaaaaagaagcaggagatggctgacacgagcttgaaccgcgtcaagcgggacaagcgcgagacccaagaggctcgcatgcgtgaataccgcaatcttttcaagtaaattctcctatcttttgttttcttgccttagctcgcattcttttcatgttcttcggttctccatttacgtctgcggtttctttttctgcttccatttgatctttttgtgatcttttttgattttcatttctgccctaatgctagtggctcgctggtttcgttttgtgatacccggaaaaggagaaggcgttaacattcattattacatctttgattctccttatgatcatacaccgggcgttttctttctatgtttttctttttacaacatccaagcacgtttatacacgggtttgttgttttaaccatagaaatcattttcttttctgcatatgccatttattggcttcagcatattcacatgcattagattctgcatactttgaatttgacttccaagggggtgtaggactcggatatgatttctgaatagagtgggatcgcgtatactcttcttcgtacggcgagatatgaatagaagaatttcccgtctagacctcagaatagtgcaatgttacgaacgagacttttttatcctactagggcatattcaggcataaaccctgtaaaatcaggaaccttcgccctccttttttttcaatcgcagcggacacatcgacaggcatgctgttttcgaaactcgcgtgcaagacttctccgttgaatttacctagaagtacttgagaaagatgtatacctcttcctcccgttcatactcatggtttctcccagctcttgtgctcgatttggtacctcccatttctttcagcaacataagaaaagtaaaaaatcacacttcccaatgacgcctacttggccaagatacataatcagcatcttgaggccattcagggagtatgtgttcatgattttgaccaaaccatcacttttcccccacttctcaccattgtatcaagatcttcccggagtttgttcaaagcaaaatcatcattctcaaactccgcggtgcagataccttcaggcaatgcggctcgcttttcagggagtaaatttccctgaacggcacacgaatcgaagtcgataatcactagcctatcatggtctcggtacctaaacataacgttacgtaggtgaggatcgttatggacaagaccaagggcatgaagatgatagatgccggccttgacgtattggagacaaatttcctggttgaccgagcgtccgtccctaaggcagccatcaagaatctcctcatacttctagaagcaaagcccagtaatccggccggcctttaccacgcagccaagatagcgggcgacgttctcatgtggaattttcatcaaaacctcacagattcgtgcttgttggagtaggtctaggccgagtgatgctgagtcgtcgtagccagtgagccggggctgcttgatgtagacgtccggcttggcaaagtcgaggcattgtgtgagaccatcttctcgaggcgggattgatcgataatggagagtagatcctctgggcgcccgactatatcggacacatgtatccaaaactagtcgtcgccatcctggaatatgacaacgatatatagaaattcagggtggccatcgaatgcccagcgctctgccatagaatgataatgcatcttaatgagacgagacagtgttgacagttctttctattaagagaaaagaggagagaaaacctggaaggtgtgtgctgtgaagaaagatcatgggcacggcgcttatttaagtacttttttggactaagaaatcttaggtgataaagcatcaagcgatgaacagtattcagggggtctattttaatatgggctaagagggtggcagcaggtgctgttacctggtggattgccaggcccaatccctacaaaatgacttgtatataacattgaaatggtactatcatgtggtattcgtgagttattcatgtgtctgtgcaatcggtaaaagacccccccccctcacatagcgccgagaatatagcaaaaataatgaaaccccacgccagtcctatctgtctcgtataactcccaaagtgcacataaaccatatatcctaagaacacatgatcaattctgagagtacccatctccatggatacccaccgcgacagcaccgagaacatcctccagccgagtccgcaactttctcaactcccgcactttcgcagcgcgctctttctcaacgtctctgagctctgtctccagttcccggattctgctctcttgctcggcctcggaagcgccaattccaggaagcacagagataaggtactcgatctgctgttccttgataatcagatcgcgcgcaagttcccgctgccgactcgcaaatgtgctgggtgagtccggcgcgggaggaaggttgggatctccaccttctggtgctgtccccggtgcagctccgggttgttgagggggtgcaagcgggggtgatgcatttccagcaacgacggctgcaccccccactttgtttgcgacggctgctgggaccggtggcgaggacgagttcttggccatcttggctaaggctggtgctgcgtcggggacattaggcggtggtgttgtaggggcattgtcgtggtatgttgtgagatagccaagcgttgcgtagaattgtgttgcgagctattttgtatagtgagcaagggtttaaatgtacgttctgctcgattcattttacctgatccaggcaagtctggagctgcgtgagaatgtcagccatggtagcgactcgaaaagaaaatgaaacaagcttgaagtagcttgagaaagatcggcagaatgcctgaaagaagcggagcaaatgcggagagaagctctaatgcggtgaggcgggcttgtctttctcacatcactcaatgcgcctgttgcgactgcaccatggccttgctgccggatattctcccttgagagtcagacaagatgcccgtcgttgcttttccagctccagagtctataatgagctgacaccgttcacccgccggctctttaaactcccctcggccccatctccgccctcgcaacaccacaatgatttgacgacatttctctcttacgccgagcatatttctcttccggtggcgagttcggtacatgtcggcacacactacgagtataccgttctcaaaaccctacgtcgttatgcgctaagcctcgaccgcatcggcggtcgtgacgatgccggcatcgatctcgttggcacttggcacctcccggagcgggaacgagaacgtgcactccgtgtactggtacaatgcaaatcactgaaggccaaagtgggccctaatgtcgtccgcgagctagaaggaaccttccgccaggcacctgtcgggtggcgcacgggcgagacggttggcgtgctggtgagcccgcgcgaggcaaccaagggtgttcgtgatacattagctaggagcacgtatccgttgttctggatgacgattgaacgggacggaaccttgaagcaggcactttggaatgcccgtgcagaggaacttgggattggccctctgggtgtggaaacacgatatggaaccacagaagacgccgagtctggctcgattacaaaagagatgatattgacctgggatggatgtgatatccccgatatggaccgcgtggagcaaaacctcgtcgagttcgccgagcaatgggtcgcattctggggtatggacttgtcggaaatccagaagggggagcttctggatgctgcagaaagagttctcccctatgatgtctcttctcaactgcttaataggaccgtatcggatgcagaccggaagaaggtcattcaagctttacaagagcgcctacaacagcagccggcatcggagtgaacactctactacccgacaatatgctatgtccaggcagccatagagctgaaatatataagaagaattgtatcactcatgacagaaaataatccaagggtatagaaacaccaacagcgatagaaaaacacgacttccagcctccaaagaaaaaaaaaaaaaaacgccagagagcacagacacccacaaaccatcgatcggcatgatcatccttgcatcgttgaccagaagtagtttgcgtagaagaagcgggagaacttcgggtcgatattaacgacatgaacatcgcccttgcggctattgcgaatgaccgctctgttgaaattacccgcctcatcgggctcgatatcaacaccaagcgaacggaatatcttgaggcgcagactagatagatattagcaagagtatcaatccaagaccgagacacaggcacaaacattgtcgcatcatcagcctcacgctcgcgccgagttgtttcgtcgccctcgagaccctgagactctaggtcgaccagtctttccttaagcatctccagctcgctctccaggcgctcgctttcaatttctagctccgatgcagctttggcaatgcgaaacttcttggtgtccaactctacaatctccgccgcgtgtttgcccgagtcgtgtacggccacggcttcttcatgctgcgtagatagagaattcaagtgacgtgaaagctttcgcattgccgactcggcctcgcgaatgcgcagatcgcgcgattgctggagggttgagagcgagtcattgatgcgtgtgatggcttgtttatcggggtggatgttgaagttgccgatcgtgtggtggatgagctgaaggcgtcagtgaatttcttaggcctaaatcatgagagcaaatagattagcacatacagttcctgggtcctcgtcgagcaacatggtgtcggtggttacaatatacagatgtcgggatagtcggttgttttgggtttgttgcggcagcaacagccacagcacagccacatatgttgctcctccgcaaagtgacgttgagcctgtgatttctccgtcctcgcttttgccttcacgcccaacgtgaccacgactcttactttcgacaaactacaatcaaattgttgaaactttcgttctaatcaatattcttccgtcctaaccaccaactgcatatctcgccatgtccaatcttccatgtaggtggttccgactgattgcctgatgcctgatgtttgaagactgacttgctgacttgttatgtcactccagacgctgctgatgcggaaaggtttgttttccgcggaaactccgaaagaaaatatcggaatcgtccgaactgacttgactatcaccgacacagtcccttgaaacccgcggagctacaggtcctgagagcccaatacgagaaagaaggcgactatgtcgggatccagacaaagttcaactacgcatgggtatcgtttatccagtcctgatcaggtgtgcccgcgctaaccggtgttccccgcctatgcggggttggcattgactatagggtctgatcaaatccaacatccgttccgaacagcaagaaggcgttcgcttgctttcagagatcttccgtggagctccggagcgacgacgcgaatgcctctattatctagccctcggcaacttcaagctagggaactacggcgaagcccgccgatacaacgatttgctcctggagaaggagcccgcaaacctccaggctgccagccttgggtcgctcatcgatgataaagtcgccaaggagggtctggtaggcgtcgcgattgttagtggcttggctctcgtcgcgggtatcgttggtagtctggtgatcaagggagccagaagacgataaacacctgttgaggattggcaggccacgacagcctaaagggtgtccgtctagagtataaccactttgtatatttttcgtgtgggatctgattccttggccattggcgatctttttattgtcggagcatccgagggcgttatatctttttctctactctttgtctctctctctctctctttctctttttaagccataagtatagttgtggtatgctacatacttgccaaaattgtacatgacccaggattcatctcatacatgcatagccctaggttcggtctagtagcacaggaatttggtcacatttatagattgctgctagtatatatctcagcatcgaaggtcacaagatgtcgattgtgtcaatcactaattctctttaacccgaacaatctttccagtctcaacttcatacacatagcctgtgataggaacatccaagacaagaggactatccttcaatatcttaatgtcatcccgaacactctgctcgacatccttgaaagccaaaaacgcaatatgatcggcgttctggtgtagatccgcacggatcttatctttgagttcctcgtcggtaaaagtgagcattccacagtttgtctaaaggtaatcagcaattggtccaaaagttgacaagatgcaagccagggtctaggcttagtcttggtttgtaggggttgcgtacatgatgcacgataacgatctcgcgggtgccaagcagctgctgcgagatgatgacgctgcgcagtgcatctgtggctctgccgccggcattgcggattacatggacatcgccttcttcaagaccgagggcgcgagcgggatctttaggatacttaggtgtgagtatcatccatcagaagtcagaagtactgcggagtatacggaccgaggcgcgcatccatgcaagccaccacggctgtctttctgaaatacagtcagatgtgtcttttgcaggggaccggggtaaaagttggagttagaatgagcgtcatcgacgtaccgctgtgggggtagctgcaggtcgcccttggtgaaggatgcggcgtatttggcattggctgcttcgaattcctttgcgacagacatgatggtttcagtatacttcaaatagattaatttagaggaccttggggtttgagaattgatatttaaagaacccggagaccccgcaaaggtgtgatatggcgaaagaaaggcaacatattctaccaatgcttggatggcgcaataatcttcagtccctgttttctgtcctaatttggtctgaagaatctttagttcactcgacatttgccctgtctgaacttgtaaggctagccctaaaaaggactactcctacacctgttgtaggcagtatcgccaccctagatttgacctaattatgactgctggctgcaatataagcgtggttatgaacgtctctagtgattgttgcaattgttgcaacttaatcaatgctaaatatagacaatatcaagccttgaactccttcttcgcaacccgttcagaaagctcacgcaagacaaccccaacagattcaaaatcacttgtctccaagtaagtctggccactcagacgagtccatagccaagggccatggtggaagactggcaggaaagtgttgtgttcgtccgtcaactgcgtctggatccaagcagctgccttaggagcttcttcctcagacaacacaaccaaagcggttttgtcggaggattcctcatttccggcagaagcaacagcaataggcaaccggactgtagtcatggcacactggcgcatacggctctcctgtccaggcttcagatcaggttcttgcaagacatcggtaccgagagcggcagcaacagcgtctgcgccttcatttgcgacacgttgggtgtaggcaataatagcatcctcgcctccgcagacttcagcgcggaatttcaacgctgctgcgacgcaaatgtacgcggagtcatcagtggtggcgacgaactcgaagagttgctcaaaggcagtctttgtcacgggagcgttcgggtcctgcagcaccgaggcgttaatcgcgggagaagccggggctgggataaatccccaagatgttggcaaggtggtgcgcataagatgctggttacgtcgtggaacgtagaggactgcacagctgcggggtgtgtagagccatctttatgaagccgagtcaatatttgtaattttgctgaagttattggaaaggatagaatactggggatagttcatacttgtgacaatttgataccaggtatattgaaggcttctattggtcaattgacattatcaatcacgatggacccactttcctctccttaattcatactacaacatacaacagtctacttttttacatgttagatatttacaacgtatcgataggaagatataacaactctaataatcacgttggggctagatattggcatgtcggagtataggatactcaatctcgaatcaagttcgaaagaaagcggcgactcgtgagaaagaccctccttgttagatgcgccctgcagacgaagtccatattatcactcatgtatctagtaaattggaagatatttcgatgactggagatatattagggcagtcagaattagtaaatcatttagcttgtcacgatcatcaattgcgatatattctaggtcttgactcacacaaacgagatattttagggaaagcattgcccaggtggggtgctcgacatatgtcagtctaacagattaaaagaagtgacaaagaagaaagttatagatggctaatattatctaggctctctgaaaaaccgtaccgctgcacttcttacccatcgcacccaccatacacttgacctctccatccatgttagacctatcagaaagcaaactaggtcaaattgcgctatactgtccagttgaactcaagcgaaagtactgtacaatctctcgcaaacacgatacaacaattgttgagagaatgtagatataagaggctgcattagcttccttactcctcacccatatcctcgctgtatgcatattcgctagtaatatccccgtcatccccgttttcgtcatccgcatcattgccaaggatgtactcgttgtagatagactcgctgtaggtgtactcgctggaggtatccgcgctgtatgtgtgctcactgtgggtaagcccactgtagggggactctgaggtcgcttcctccgtatccatattctcgtgattcgaatcctcctcatccgaatcctcacccgaattctcatccgtgtcctcctctgtgtcctcctctgtgtcctccccatccgaataatcactaaataaatcctcatcctcatccacctccgacagggccatgattttctcaaactcgatagattccaagtttggcaacttttcagatagagcctcaaagcccgcaatataaataatggttggtatctcaactcgaagattcaacaaccttgggaaaagcttctagacgtacacaagcagcggttagttatatcctacagcagaaggatagctattgaaacaaaccggaatccgaccagtaagatagtcccagtggtgaggaaatagttggatgggcgcattccaacgttcgatataaagtgtccggagatttggcatatttaaagctggggcacggatactctcttcggtgctccagccgcgaaagactagagcaaggtacaaagtgtgtaaattcgggaagaccaaattttctagagctggttgtaccactgcttcagtcttctggctgtatgttttcacagttgcaaccttcataaggtcggcatacatctggcgtcggtccggggagacttttaccatgacctcgtcgaggtgcatcccacctgatatttccatggagccccataatatacgtatcgcttcatggaaccacgtcttattcaccaaggcgcaattcaaaacccaacgtgggccattcgatgtgtatttgatccaaacgaggatttcacttactatctctggaagagctaaagctcgatggccactgaaagtcacaattttatggctcatgttggaaaggagtcagaactgatattgcgaaggaagaagtagaaaggaatgatatagtcacaaatgaaactaaagtgatgatgttgtaaaggatagatctctcatcaggaatttcctccaatctcacagatggctccgtgaaagaaccatggatcacatttgtctccggttcctgttctgatacgtagggagtaagtcttctcttactccgtatctctttttgtttctttgatttccgtgagaccctggtccatgcctaatgtttgtttgaaatgcttacagttgtctatctcatgatggagattatttgtattttacttttctgtttcaacccctcatcgtgatgatcctatgaagatagagtgtactccgtaccaaactcaaagccccgttgctattttgggacagaaatctcagactatgcctattgtaccagcaagatcctgttatagacgtaagttgcgtctttatcctttttgaaatcgtacatataatgattcccacataggtgagaattttaactgtttgtatatatggagcaatagggcgtgttaacaaaaggactagttataggtagtccaagaagctatgaatgtatgtagagcacgcgtgtctcatcaatcgggtactcccattttggcatctatgaatggtaaagtaaagtgtaaacaagaaaagaggctgcctctaaccaccccaatgctgcggctgtttcgttagccgttgaagtcatggctcatgtgtcatgtccaataaaaatataaaccaacgccgggtccaatgaagtcatcaataataatacaaacgctgaagcgttcaacccaataaaataacacactcaaaagagcgcacaagatccctgcatatcaggagctggtgtggtcccgaaatctcaacgccaaagcgggaaaaggcaaccgaataaaaaggcaatgctgctgacataaagcggaaggtagactgtgggggaaagattcgatattaacggacgaatctaatcagaaaggattcgggggattgctcactcattgagtctccacctggtggcttgttttgaccggaaccagactcccagtcatactgggatcctgtcgacgaggccgaaggagagtcgctcgctacccagggccaaacatttggggttacccagcttgtggtttctttgtgggttccactccagggaactgggacgctgtcgacggtcgcagtaattaaaggtgcggactcggtcgacgtgggctcagcggctttgttgccattgactttgcctccttctgcaacaattgactcccatgagccacttgtgtcaccatatttgtacgaagttccggtggagtaatccgtcacggtcattgacttcaggtacattttgaaggggccttgggtatagtctgtttcaccaccagcccagtctgcacaaacacaagctgttagcaagcacgatccaagtaattttcaggacagccccactcaccaattgtgccctgggcattgtttgaatcaccgccagcccacacaccgaccttgatcatcatcgggctctgtggatactggttggtgtctgccgtctcgggtgtgagaacacggacagtcttgccatcaatcgcccacacaatctgggtgctggtccagtcgatggagaaagtgtgaaattcatcatggtttccggcattatcgtggtaggcgccacggctatatgaagtggtgtctcctttgccgaagtaattggtttgcacttgagcgttgtttccgcccagccactcccagtcaatttcgtctaaatcgtcggactgcagaactgcactgctcacgattcccgtgcctgctgctgccttgatagtgcattccacgcggccgaacatgatgtaccagccggactgaatcagcgggccatcaccctgcttcgaaatagtgaaggtggcaccattcgttgagtcatatgtgacggatccagtggacttgaaagcatccgatgcaccacttgtgaaatcgaacgtcttgtcagattggccaaaggcaggatcagcgggacatgctactagctgttagtgacctgctgacacaacggaaattatgagcctcacttttcttggtcggattgcaatccgtataagtctgggccacgaccagcgtggaagagatcaggcctaaagccgcaccaagaaagaaccgcatggtgggccaagtcgagtataaactataagtaatcgttgactattatgcaataatgaagatgagttgttggagttgatacgagatgggtgacagaggaaggaagaagggcgaaaaggagatttccaagtgaagggagtaccccgacggtcttaagacaatctgagcaggtgccagcctcctctgtttccgtgccttccctttcggtcgatatgtgggtcccggctgtcattgggccaatcacatccatccccggatcgagattgtaccagctaccgagagcttcgccacgttgtctccatggagtttacatggagtcattctatgtagtcccccgtacattcgacgggtgtgcagctcagatgccaatgtgcaacagttctagtgtgcactgcatgtacaatgactatttgtgtgacaaacatattcgattgggtatttcgatcgagaatacgtacggggtacggtccgcactccatacttataacatatatatccattcgatgagaatagtctcctgaaagagcggcaaggcccaagcaaaacaacaggcggtaggggacacacgtatattaggacccacaatcccagcctctcgaatttactcttgcctattattagagatgtgatctcatgttgaagattttctctgcatgacagtgattcataatccgcctccatacggagcccttgtctcctatccgaaacaaatatgtgctaatactaatcaatagtcgtgattccaatgttcgggccagggctacctaccattgggcagccatctttcattagttctagcggcctgatgaatgatatgacttgaacgaccaacctgtaactttgacttaatgggcactctttgctgacctagatcttggtcgacataaagccaccgatctcagtggcgatcgatgcaagggcgatccgttgggcacgggaaaaacatagaccaatgagtcctattatgtttcgctaatgacttttttctttggctaagtatgaaaaccggaagaagaaggaaaaatcttcacaaaagcgaaagactactggtacataagaccgtgggccataagagatgccgtttgaacttactgtaatcaggatggtcggagtatagggctatctttaggacgcaaacttcttgcggtgagagttgttgatgagctttctaggtttttttacgcaatcaattctatgctttcagctactcgcaacgttgctgaatagatttcaatattctcatccgaaattctaacaatgtttgacctaattgccggcttttctgtgggcacagtcctgtcgaaaagactatgactactactcttcaaaccgacatgaaatcaacaccaattccacaaccgaggctcgtgcaaatatcgagttaggtctagctatatcttaggttctagatcaggtgtggtgttaacatataaagttccgagtgattcgacgcgggtttgtaacactgtcagttaaccatttcgactttgaataagcgacaatgggcacggaaaaatcatgctgctccactcgtcttgatctgcaggtgccgtggaatagcggtctccagcggattgctagacccaccttttagtgtgttgaatcatgaaactgttaggaagctaggctatcctacttaaattacattgctagactcttacattcataccgagtatgagctcgaagattatgctaaggtagtgtcatgaccgcatggacacactttcgacattccgctgttactagaatagcaagatgtagatgaatggtcttgtctaggaactggcttagagcgtagagagcacacccaggagatataatgtatgtctagggctatcgtttacgactagcaatataccctaagagcgtatttgatatctagatatttccaagggaaaaaaagcgtgcttcatcttcattcgttgcgcgatcgaggttacccgaactggttttgatctagcctacctgtatctcagggctgttctaagggcagggctattatttatactactgaagctctgtgtaccataatatcataatcgatgggttttgtttcgtaaaattatcctatccaaagtactccatatcttatagctggaatggatatatcacaggccggatagattgcaacgaagggaaaatgagccgtgcaacggttgcaatgcacttcttggcaatccaagctatcaccttctagtgaggccaagataaaatgaaaatatgagtaaaaccgtggaaatgctacaaggattgtttgttacagcctcgataacctcgagagtggaatcaccccggggcggggatgacggtctaatgactcgactataccccgtagaggcctatgcaatgaaagtatgccacacttgtatgctttccagagattttggttactttgtacaagctatttgcgagaaaatgcgaaaaaatagaacagaagactgtaaaagtcaagcagaataaagacgggggagctccacagcctagcacggacagcatcacggaccatacccaatgagaaaggttatatagtatctataaaaaagacctcaaagagaagaggtgaacaagggaagaaataaagaaatggaagggaatacaaagaatagtttcaactacatgcacctagtcttcaagtaatctagttactagtttagggtgaagatgttcccaaggtattctctcaagcgaagttgttggcgctaagagcctcatgacttccgacggcccagtacccgaagctcacacagggttattcttccatctctcccttattacatgaatctcatgtcgagcttcggtcctttttgatttttttaatagggatcttggctttgctctcgatcgtcattacgttgatccgcctttgtcacgagtcacgactatccccactctccttcttccccccccaattaaccctggacctcaataatcaccccgtacgccttgccagtatgcgcccgggttgcccttaatcgcaatcacctcctaagacctcatgaaataacgcctcattttgacactcgcgcccgacgctagtcttacggcctcggtctgcctcagcttttcatacgccgtcctccgctttcctcacgcccccgctagctctcccaactcctcgcgcccttggtgccacctcactgattttcctcgtccgcaattcaaattggatgtcctacggagtgtattccagctattatactctctaccgcgtcgccgggtcggcctccacaacgtggcgctagcacccgagacagcagaattgacaaccacacgttgcagctcccccggtcacccacaccatccgataaccatcggtttttttaatgctgggcagttctgaaatattaccatatcccaaggtaaagctggctgcaagttgaacagggttgccgtcgtggcattcggccgagtctgagcgcagccatgccggcgcgggaccccaaccaaccggacaaccgtcagggttcggacagctctgcaaatagttggaggtcgcaggataccgtgcgacactctgagagctactctcgagatggagatgaagcctttacgggaggccacaatgccgacacgtttcccagttccttgaacatggaccccaagtaagcttctgttctccaaatgacctgctgactctctacgcggtcatggcgcgttggatccaagctcaaaaagaagaggcgctaagaattctttattttttttgccaggcccgactcctcaaaacctccgaggattgattggggaagttccatgtggtcatggaattcccccgatatttctcccaccgagcaacgcaaacccgctggctttagcaatcaccgcgaggctttgataattccaaacaaccgagataacccgtctcaatcatctgtctcgagtccccgacctccgccccttcgctcatctcgcgccgactccgacgagatcgagtcaattgccccgtggtccacagtccccagcagtagtcagcccgatgctagcggtactttctatcatgattactctgaacatgaagcttcgcctgcgtcaaccacatttcgtcctgcgaccggacgcacaattgcgagcgaacccgctgagtttgaatcccatggggaacatcgccggccatctgctgcaagtgcaaccacggtcagtagccagggctctagatctagtattagtcaaaaattccgaaagaagcatttgaaaggcttacttggagatgactatcatgcgcctggggaggatgacgatggctcccagaacccaccaagcaggcgtgggggaccagtcgaccagttgaaggcgcgagagagggcgaactcagatggctcacgcaatacacccgaggggtccaacgcctcgcaacgttcccaaaagtcacgggcaaataacccgttgccctccagtgacatcactccatgggattatcagagctttaatgacatcccgcagtatggggaggcaccagtgcgccatgtacccatcggccccggtggtcagcgtcttccaacctcggaaagcggtccttcggggcagagggacccaagcagacggggacctggcaggcatcgttcctcacgaagcaaagaagagaaccccacccttgctggcgatctagcatggtcccaaccccgacctgctactggcagagacgacgttggaccgcggccgtttaatgaaaactacctgcattcagcgactgacatgaacgactccactgcgtttgggggcaggtcggcaagtccaacacccagtgtgcgtagcgcataccgagaccccgatcagaactcacagcatcccagactcggcgggttcatcaaaaagatcctcgggaagtcgcatgacaaatcaaggaactcttctcccccacgacgtgataggcaaggaagcctcgaaggaagtacttcctctcgatacgcagagtcagtagattcggatcgaaagaaagataccgggaagggtttgatggtgggaagaaagcttggtaatcgtcgtgtgttcactcaccaaggtggtggtggtgacctttataaccccaacaaggacgagaaaactcaagaggagaacaagcatttcttccaccttgatgtcgatatggaaaatctgaaagggattgtccgtccaccctcgcccgggcaaacgaagcgtggaagggatggggcaatcacgcccggcgacgaatctaaattcgaaaagccgtggaatgcgcctgaaagttggcaggtcagggggcccattgaccctaccttggaagatcctacctcggaagaacccacccgcgtcggtcctcgtgatcgtgagacttcgtactttattcgaatcttccgaattgattctacctttgccacgctatcggctggtccgaatgctacggtgtccgaaatcctcttgatgcttggtcgaaagtctttcttgcaagatcatctcaacaattatgaaattgttttgcgaaaacatgatctttcgcggcaacttgaccacaatgagcgacctattcaaatgcaaaagcggctgctagaacaagtcggctatacgcaaaaggaccgcatcggagacattggccgcgaggatcacagttatctctgtcggttcatcttcttgccgacaaagcttagcggttacagcagtctcgatagtgaaccaggtttcaacaaagtccaaaaattcagccatgtggatctccaaggccgcagtcttgtcactattccaatcacgctctacgcaaaatcctccgagatcatctcactgaacttgtcgcggaatttgtcattagacgttcccagagactttattcaaagctgtatcaatctgcgagagatcaagttcatcgggaatgaggctgcgttcctcccacacagctttggattagccagccgattgacctatctagatgtgtcaaacaactgcctcgaagacttggatcatgcgggtctcgagcgactgactggtcttgttagcatcaaaatggcgaacaatcagttaaccaagcttcccagctctttcggcaatttccaaaacctacgaagcctgaacatgtcgtcaaatagtttcaaggtcttccctgaattcctttgcaacctcaagagtctggttgatctggatatcagcttcaatggaatagaagaacttcccaatattggccgcttgacctctctcgaacgcctttggatgacaaacaacaacttgagcgggcctctcgatgattccttcggggaattagtgaacctcaaggagtttgatggacgcttcaatgctatcaccaatattgatgctctctctagccttccacgactagagcagatattctttggtcacaatcttgtatcgcgtttcaaaggttccttcccgaggttgcgaagtctatatctggatcactgccctatgacgcaatttgatgttgacgcccctatgccaaccttgacctctctaaacctcgcctctggcaagctctcccaattcagagatacaattttcgagaattgtccgaatataacgaagctcgtcctcgacaaaaatcatatttcctcggtttcgcctcagatcggcaagttgcgtcgactcgaacgcttcagcatgatcaagaaccccctatcatctttgcctccgactatgggttgccttgcagagctcaagcatctcaatctgagggagtgcaatttgaattctctaccagccgaaatttggcattgtgccaagctggaaatactcaacatctcctccaacattctgtcgtcctttccaaaatgcggtgctccgtaccctcaaattcccggtgaacctgcaagcacacctgggactacaccaggcatcgctgaaaaccccagctatgaagatgtaggtccactggatgaacaaaatctacgtcgacccagtcaaacgtccaatggtggtctgaatcttgtgtcaccgaacgggcatcggaatccttcaactgcccaatccactaggaaggtatcgagggcatcaccatcatacaccgaccccaactcggggcatcggaaggactcaaacttctctcagcaaatggcaatgacgtttgcggcgtcccttcgaacactttcacttgccgacaacagacttgaagatgatgttttccgggaactatccttgctcccagagctgcgtattgtcaacctttcctacaatgacctgacggaactaccgcaaggaattctcaaaaggtggccattgatttcagagctgtacctgtccggtaacgagttgacctccctcccatccgatgacctagaagagggaagcaacctcaaggttcttcatatcaacgcaaaccggttccaagtcctgcctgcagagctttgcaaagtcagcaagctttctactctggatgtggggagcaatggactcaaatacaacgtgtcaaactggccttatgattggaattggaactggaaccgtaatctcaagtatctgaatttctcaggcaacaagcgtctagaaatcaagccaaatatcgcctccctgggtcctccggccgccaatggtgccgacctgactgatttcaactccctgactcacctccgtgttttgggactaatggatgtcacactcaccattcccacaatcccagaggagactgaagatcgccgtgtgcgtacatctgcctcattggctggcactctcgcctacggtatggccgactctcttggcaagaccgagcatctatctattattgatatgattgtcccacggttgaagcaggataatgtggaaacactcctgggaatgtttgacggacagacactttccagtggtggttctcgcgtcgcaaagtacttgcacgaaaatttcacatctactttctcgtatgagcttaagaagctgcagcgagatcacggcgaaacaccagtagatgctctccgacgagcattcttggcattgaacaagaatatggcaggctctgcctacagatccattgatgaccgtgagatccggcagtaccatcgaggatcgactgcggccaaactgctcaatcaggacgacattcagtcctggggtgtcgctactgtcttgtatctgaacaacatggacttgtacgccgctaatgtcggtgatgctcaggctattttgatccgttcagatggttcaatgctttccttgacgcaaaaccatgatcccgcggaacctaacgagcgtgcacgcattcgtgcagcgggaggtttcgtgtctcgcaccggaaagctgaatgacgtactcaccgtatcgaggtgcttcggccacttccctatgatgcctgctgtcattgccgcccctgccacaatgcatgtcaccttgacggaacaagatgagatgatcgtgttggcatcaaaggaactctgggattatgtcactccggaagtggtgattgacattactaggagagaacagccagatttgatgtttgcagctcaaaagttacgtgatttggccatctcattcggtgccaccaacaagctgatggtaatgattcttggcgttggggaaattcaaaggcgacgcccaaagcctcgtccttctcttagcactgcctcgtccacgtttgctgaggagcagatcatcccaactgccaagcgtcccaagaagcgcgatggtcctggagattcgcgactcgcgcgcttcgaacatgtgaatgctcccgagggtgaattgactatcatgttcactgatatcaagaaatctacgggtctatgggaagtttgtccggatgcgatgcgctctgctattcaaatccacaatgacatcctgcgccggcaacttgcgatcttcggtggctacgaggtcaagactgaaggcgatgctttcatggtggcattctcaaccacgacggctgccttgctgtggtgcttcaactgtcaaaaccagcttcttgaggctgagtggcctacagagattctcgatcagccccagtgccgagttgtggtcgacatggacaataatgttattttccgtggcctgtctgtccgcatgggtggccattggggcgagcctgtgtgcgcgaaagatccggtcaccagtcgaatggactacttcggtccaatggtgaatcgtgcttcgcgaatctctggcgtcgcggatggaggacaaattttcgtttcctccgatttcatgaccgacatccaccgcagcctcgagattttcgcggatgctgagcgttctgcatccactagctcgaccgacagtaatcaacggggcgatagtctcggccacaacattcgtcgtgaactgcaacagctcaacagtcaaggtttcgttatcaaagatcaaggtgaaagaaagctgaagggtctggaaaatccggaacccctctaccttgtttacccctcctcgctttctggtcgcatgatcacttcggaagaatcacaggatcgtgatagcgccgttgcaactatcagcccagataaccaacttgacatccagacaaacgtcatttggcgtctctgggaagtcacactccgtctcgaacgcctttgcggtgctatggagcatccaagtgaaccaagcttcagagagccgaacgtcgctctgttcaacatgatcaagaggcacggaggtgagctgaacgactcgaccgttctcagtttggtcgaccaacaagtcacccgcatcgaggttagtatcacacaggctcccctttcgttctacttccaatcctgacaaattccaggtatgcatcaatacactctccatacgacatatgatgcgtcccttcaagccaggcgataccctcagcgatcacgccgtacccattagcgaggtactacagcaattacaaacacaacttgctgaattccaagctctcaaggagcagatggccgttggtgctgcaggcaacatcggcggtccaccatctcgtgatatgatgggtcattcagggagtatcgacagtggtattacctccgcgtcgtcatcttccctcaatctcaacagtgatctcaatcgctcttttgattctgggcgcggctaccattgatttctgccacctgctctatagcactaatttcaatcccactttggttggctttcacttccttcttagcttttcttctccttgattgtatctctttggctttattttggcgggcggcgtcccactggcgggagggtggtctgcagattgttttgtataaagcattatggcatggagccaaggtgattgttttgaaaaactgcttccgttattggctttgatctactttcagtttttgggctgtaattggctctgacagtggatatatattacagtctatgtgatactttcatgggcttttttcatatcattttgtttgatcttcacaaaaatagtcggctgcttattcggtatctgcccttgaaaatgcaggcctatagatctgcttcatttggctaataagggatgttgaatgtgacaacatactgacgttttttttgatgtctttttagatgtttatgggggagtgttctatgtataaccagggactatgtctggaattttcctcccatggacacctattaggttcgaggtatatgactttatcgcaaggactttgcgatatattattacaaagcctttttttacgatcacgatgaatccagaatataggtcgactttgactggactcgagcgcagtctttgatcttaattccttgctttgtggtttagtacacgcatattcattatattcattataatagcgctcgaagccctactgacgattctttgatatcaaatgccaagatcacagttgctggcctgaggcgccaacgtcatttttgaaaggtcacgtgccactgtttatgcgtgcgtcatcgacgctgttttctttatttcttggtctgctcacctcttcgtctggtaaacccactgcaaagcaaaaaaaagaagtgacatatgtttcttgagcttcttaactacccacatttacatcttcgaagtcgttagccacaaggtcggcttttcctgccccgcctgttgccctggctacgaactgaacgaataatctggcgtaattaacggcccaacacaaaaacaacacctctcctaccccagtaaaaattcgaaaaagggagcgatcgctggaagctcacttgcatattgcaatctcgcctagctacgcaccgtgctgcaagtttggtatccatcttacgaaaggcccctacgccatctcggtcggcgtcttctaatcaggccgcaacgtcgcacattgcacgccacacgaaatggcggatgaactggaatatctccatccagatttcgatctgaactctctcaccgtgcctcgtctccgctcgatccttgtcaaccacgatgttccctaccctgcctctgcaaagaaggctcaactgatcggcatcctcgaagatgaagttcttccgcaagccagaaaactcttgcgtgaccgcgacagggttcgacggaccagtgcaggtattacagatatgggcagtcggtctacatcggtggcaagcgacgtgaacgacagagagtcgatgcctcctccacccacaccctcaacagtcggatccacaagcagaagcatgcgaggcacatcgcgtcgcagcacccgtcactcaacggtagatacagatgatggtctggaacctgccacacctataaggaacacaaaacgcacgagcgtcgctcgctcggtgggtaaacacgctcgcacatctgacacggaaaccggcgacgacacactcgcgactccaatcgctgctacccgtcctacgcctcgcaagtctacagctagaaaaatcggacggagcgagatcctcccttcgacagaactggatgaacacactcgtattaagtcagaaccacgcaacgagagcatgtttacggatgataatccctttcaaagtggaagccctgaggcccctaaaagcgcaaggatgagttatgatggcaagcggaagagcgtttcgcgcttatctacagacagtccagctcggggtcgcggactcaggtcgcggaaatcagcaaccccgtccaacgttcagcaagacgatggcttccagccaccgaagcgggattcgtttgatttcgcctcccggctgatgcctccacaggaggaacctgaggaggaatcggatgaatccgaggatgatgaagggagcgaaattggcgcaggtgaagaattcacacctgaggaacagctcgctatgtctatggaggatgaccagtactcgccacaaattcaggctagacgacggccccaaaagcaaagcactctcagccgcttggcaccttgggtagtcatcctgtcactggtcggtagttttggtacctggtggcgcaaagaaaaactcgagattggatattgcggcctaggaaagcccacctggtctttggcagacactaaagttcctgaatgggcgaatgtgctggagccccggtgcgagccgtgcccaagccacgccttctgctacccagactttgtagtccgctgcgaaaatgatttcctgttgaagccgcatcctctcgccctcggaggcctagtgccgttgccgccaacatgtgaacctgatagtgaaaaggaacgccgcgtgaaggccgttgctgataaagctgttgaggagcttcgtgagcgccgggcaaagtgggaatgcggtcagctaaaggaagacgggaagggcgccagatctccagacatcagcgagccagagttgagggaagaggtggctaagaaacgccgcaagggcatgagtgacacggaatttgatgagctgtggaagggcgccattggggagatccttgaaaaagatgaagttattagcaagaccaagcagtaagtttcctttgccctaggatggattctcgtgtctccttggctatgctcgaggctctggatttcgacatccagccgcatttcttataaagatctggtctgaccttgtgtaccggaactgacagaggcgcgttcgcaatcacagaaattccgccatcctcatcctctcctccacctccattgcacggctcccactcgcatgcgccgtccgccgctacttccgactcactctcctcgcgtatcgactccctatttcacttttaatcatgaccatcggtcttcttgtgtacgctcgtgcgcgtgtcctcgcacgtcggtctgacattgctcgcgtgcccgaattggtagctacaaccctcgaccgactatccacgcaggctgcactatacgcccgcggtgatgccaaagaacctcatattgccatcgggcagctccgcgatgacgttctccgctttgaactccagggcaagcgtcgcgaggagctctggcgacgggtccgcagctttgtcgaaggcaacgccaacgtccgcgcttctgtgcgtgaaggacgtagcggtgatgtttctcgggtctgggagtggatcggtgggattaacgctgtcggcgagccggaacatattggccgccgtgagagtgcacgattctccgtcccttctccatccggtaatattgtgacaagccctcagacgcctgcgagtgaaagccagcccgagcctatttctagcccaagagagtctcgccgctgggacgagagccgtccgatctattgattcttgtcctgatgtctagaggatgatttggacacgcagctccactgtgctattctttttgatatcccaccgttttttcttttctcatatgagatatggcttttgtttcccgggttttcttgtcctgattacaaattttattcccaacttccttcacctgctttatcagaacatattcttttcctgtccatacgaatttcattatcaattccaatcagaactttaattttctcagagacagtcttcgtcctagcgctattgcatgatattaaaacaacggctgcaattcctacggatttggcggtgttagcgtcaagtcgaaccctccattgcatatcagcagcacaactatataactgctatcacaccgatgaaacccaagggcgtaatctagggaaacctacagagtacatattcctaccaatgagtatagtactccgtatcattaaaagacctatgtatcagctgttccagcccaaccgcgaacaataagacccacattatattgctatactatactacccccatgcggggggtcgacggacaccacggcctaacggaaactcttgcttagtgtcaatcttaaagatagatctatatgtaggcggacgtgggtttcttttccgtgttcgcgcattaaattactcaaattagcgcgatcttcttctaattttatgcttagtagagagtaatttatagattactctgaatcatagtttacttacaataccatcttctgtatctggggtttttttagacgtgttcatgggtagaagaatggaggggtacaagattgacatctagaatttccgttaggccggtaacctgcaggggttggggttggcaaccttggaaggaccgggtagtgttcatgtacaatgtcgatcagttaacaagccaagtgaacagaacagaacaggccctggtatgtaaactcgttctatggggtatcgtgtgaccagtacgaatgagtgcctagacgcactctacggcgtatgcagataagaatatttaatgtactattttacccttggcattcttatgacccagccaggcacatctatagttagccccccatgtgcatgttcgacgtgaatctggatttcggtaaaaagggtaaagcgtgttcgctctcgctcttgaccgtctccatccttgatgcccaacgtatcgagctgatcaatcaatatccctgctagtttggtatttgctggcgtcaacgttctgcgtcagttctgcgttaacgtcctgacccagattgagtgaggggaaattggatcgtgtgtggggtttgtgttgagaatgttctgtgctttcattcgtttttgggtctataagagtgctggtattggtagaaagtagggccatcaaggcggggtcgtttggcctcagcatccaatgagatgcaggagtgacgttcgaggctattgcaagccgcgcgagtcgcgtatatcaaaagtgccggaatttggaataggaccagggaaaccaatctaggggagttgatatattagctgcttcgcttactagtggctactaccgcaggacttcaaaggattcatctgcaggtggctgatactcgcttcaaacatcgcttggcagatagctattgcattgcagcaaacaccaggtaatcaggaagagaggagctagtgatacgtgcatgcataggtggtactgtaaaaggagttccttcctacccgcccagccaaccagctctcatgtttgctcgggagaaaagggttctgtacagtagtgagacgagggatgccttttgtgtgcctggtgtacacactaccgtttggaagagaatatagccctacataagaggactcttgtggcgaataatcccagggttgaccgcttcttgagggtcatccaagggaagcatcctatcaagaagggctgggggtaatgaggtggatacgggcattatccgtacggagaacaccttgctccgttgtcttgaattttccttttttttttcctttttcacgaaattgcgatttcatctcgggccccgctctcctttaaaaccgagatacagtaactatagtaagtacgtatggtgtggacgactgcttcctccagggcaactcgggaagctcgggaggctttattctttatatggccgtaggtaatatggagtaagcaggattacatatagcatattcgaatggtttggacttgtaccggataggggccacgtagcgttgtggcaagatggatgaacggacataagaactgtgcgtataagcacagggctcggatagtggagatattggttaatagaggatggagaatagtatgtaactatgtattgatatggggtaagatttcagatattgcggatatgcggctagcagacggagtagttccggtgttcacctcgcttaagttatattgagtaagccccccgagtatatgcgagattggatggctagggataaggattgcgatggtttagcttgccgacgcagactcttcactcagtatgtgagccatggttgaatttggcaaaagcaagagttgcgaatgccttcttcttagaagctttcaaggtttttcttcggtaaaagcaaacgaatcatgtctggtacggaagtattctccccggggaattatcggatgtgaagggaacagccatgcctaggtctacgggggacggattttggtttcattttgtcttttacctttttttctccaaaaaaaaaaaaaccaaaaaaaagaacaaaagatgttaaagttcaaagaccacgtcgtagtgaaaatcgatgtgaagtctacatagtcaggaacaagatgatgatatcgaaatcgcccctccccatgatgaaccatgggactcgttggttccagacaagattgtggacctgtcaaacttataccagaaggctatgcatggtccgtattggacttgccttgtcccatttcattttgatatatccacaggttttaacatccatggatatagatacagcatacaatcggcagggtacgatttaccgtgcatatactccatatttgggacaaatttgaaccatgtgaatgggataagcaagggacatgtaactacataactagaatctgctaatataagtgccgtaggagcctcccagagcccagagcccagagcccagagcacggagaccagagcacagagccccgtcgtgaataccccacatatatatagtgttattcgtttcgtcagccgagggtccaatatcgagctactttgtatcgagggtgatcccgaaagatgttcccgttctcgttgattgatagtctacctaggccgacgaggtaattccggaatgggataacaaggaggacagaaagctagaaatcaagtgactttccagagtaaaagatcactggttcagcaactcgtctgtctttggttcacatgtggcaaaacacccgtggtggaggggttgacaacgtttcgcttggtggggtttacacatcgtctactgcatacagtatgtaactaacgtacgtgggcccgtgttgggtggaatttctcgtcgaatgggaatgtttcaagagatttagtatctgcatcccccgtatggatatgtatacacactagatcggcgtgcagaggagactggggcatttctcggagccttgcgcatgacactgcacatgagcataattagattagtgagagaaagagaatttctggtaaaagaaaaccagcatcagactctagatcttccgatcgacaaagtaaaccgagaaggtcagggatcgactgaacggcatagacccgctttttccaatcgacatagaaaggggaacctgggaaaagacgagtagaggaaccgaacggatgtcacgttaataataacgttgttacagaaactcacctgggtgatagggtcatgatttcatattgggagagtcgggttggttgagcctatcatttaccccggaaaataactccggggtcgagaaattagggttatggataggagcagtcggatataagcatatgaaggaactcaacgtaaaagatattgtcagaaagggtacaaggtgcattgtataatatccacgttgtatagacacgatatacggactcattcgtctgttgtttcgtacttcgtacctggctaataactccggtaattagcttcattctcaccattgacagcgagtagaaacggtactgagctgttggtataatttgtatttgactcttgacctttgatatccttcgatcaaccagtattttcttccttggaggctctccagctcccatcacttgcttattgtctggatatgcctggaggcccacatccgccaccgtcgaatctctcccttttccctgtttttttttcgtgatttttttctaattttgcgcatttctggacctgtttacctgttatttacatgttattttccgaatttcctattatttcccatttttccctccttaatatctcccatttcccccccacttcgctctcatctaggcaccgcacagtgcagaattcaactgcataggtctagcgcggccccagggcccctcctctctttctccattctataactctctctatgatctgtccgttttccccacgtgatttgctcgattatcatgctttgaaatgagtggttggaagacagagagttgggcttttgatttgctatttctccctttgcttttgtttgcgggcagacttgatgaatgaacagacactccgaggctataggcctcttgcgcctcgcaccaggctactcggtggatccggaggggacggcggagagggagggagtccttctggcgggggtgcaccagaagagaaacgcatgagacgagcctcgacggcttgtacagagtgccagaagcgccgaactagggtacacatctcactgcgcttcctattttccctatctctccccttgctcgcacctaatcagtactccaaatcaatctgacatgttcttgttgctatttttgttagtgtaccggtcctcccaattgcaccgaatgctcaacccacgcccgcgaatgtgtcttcgatgaagccgccgacaggcgtcgcaaggcctccgccaagcgaattcaggatcaattggaccatttccggtcattcgtggacgatctcatcgggctcatccgcgatagtgacggtccgtcggtacaattaatcgtcaataccatacgatcgggtgcaacccctggagagatccgagatatcctcacccgtctgttggacgacgataaccaatccgattcccgaaattcaggcatgcgcgactcggacgtgaacctgaactttaccaacaatcacatgggcaattacttccacccgccacgctgaattaccctaatcttctcctccggcaacatacgaacctttccaatatgcgccagacttaccgccgcctcctccccgaattctttacgccaaatcttctcgatcccaaatcctcaaacgaccaaacgaacctggttgtttcatagcgtttccttcatagctgttgttcgtatcgggtttgagatggagcaggtcattcaaaaaactgtcacattcataattcaggctgtgtgaccagctccatctctatggttgctatatctcgagacagattgagatctcgcaaaaaaaaaccagactgttcctgttctctcacccgagccctagcattacatttttctttttgttgcaaatattctttgcgcatcccagaatcaggggctttagaagcttgcaagattgcggagggtcttttgacagaagtgaatatacccagagatacccagttctagcttgtcacgttcggactttgttgttggagttacacgtcggggtgttatggggttcggagcaagtgtgattttcctttttatattgagcccctggcggatattcttccaacagcaaccatactgcaatgaatatctttcctagcctagggctttatccgcgtttctttgagagatgtgacccaagttcattttggtcactgaaatcatattatgtacccctcccctttgggtttgcgcaccagttgtcctctcgcgcagatcgaggctgctctctgttcatgttagcaaattgcactccaagatgatattggattcccgtaatcacacttggagggtccatgggtgatatgggcagctgatcacactattatattgttgaacatgttctgaagactcctatcaaccccacggacatgatgccagtcttctccaaccagcggacatggtacatgaaccctacggtaaaactgcttaccaagggctcatatagaagtattactctaacttagctacagggagcagagcacccacttcgtaagacgatatctatacgattttgacaagtgaacagccccttacctgaaagcccgatcagatatgatcttccttaatctttcttaataaccgtacctcacgtagattaacccatatccacacctatacttcaaatgcctcataggtacatagtaaaaatccggggaggtggaggcatccccgcgccgaccggagacttgccgagatcctgtgcttttcccaaactcccaatttccccctctccggatatttctcctttctcactacctcgaagtcatctccatctgacattcctcgggacttaatcccctggctcggcctgtgccgatctcgatatggaaaccactagcgttgccttgcacgaatctccccggcccgcagtcaaacccaatgaaataacttcaacattgcccgcgtctaagaggaaagcatctgacacattaaaggatggtgttgcacagcgccagaaaatcaccagagcctgtgactggtgcaaagtaaagaaaacccgatgtactggtactctgccatgcacaagatgtacacgactgtcaatggaatgcaaatacaacgccgcatattctcggggactaccaccagaccctcttcctgtgtcaccgggtccaatttcgactcccactagaaatccggcatttgaagctgtggatgggcgcatatccagcttcaatttacagggcactggccgggacccggctttgaccaacaatctactttcaaaccaaagccaaagccagcgccagcatgtgatctcaccgcggcattcaccagaaccaggttcaacggattttgagggtaattacctcggtccttcatccggtgtgtcgttcttaaatcgcgtatggagccgtctgcatcaagatgaaaccgcgaacttcccagataaactccaaattgagtcctcgcggaatacagccgtctttatgtttggtgataagccttactccaaccctcaagacgcggaatttaccctcccgactctggaaaaggccctggagttggtgggaatatacttcgattactctatggtgacttatcgattcgtgcatagaggtaatgtagaagaatggactagacaggtttatcaaaataacatcggcctctcgaatctgccggtgggaaatatggttgctcggactgctatcgttctgatgatcattgctgtgagtactttgtacatggaaatgaggcccggggaaatgcctggggggccaggtgaaagattagaaaggtcagtaatctcttgatatcagaaaaggagcccagctgagaaattgcagtgagcgctggtacgcagcatcgaaatatatgtcttctctcgagtcagggccgccgcgactggaaaccatccaggcccggctaggccaatgcctatacctgctgtcatcgtcacgggctaacgaatgctggtactcattcggaacgacaatgcagattgtgactgcactcggattacacaggagggggccagccaaagtctcgaataacgggtgctcgtatctagaattggagcttcgcaagcgcatcttctggagtgtatacactctagataaatatctaagcattatgttcggaaggcctcgactgctccacgatgaggacatcgaccaagaactaccgaacgagacgaacgacatagacttactggaagaagacccaacgcgaagaacaggatctacggacagcatgatgattgcctctgttcttcattaccggtgagtccctcacctagcctgtacgtatacctgagcactaacatcgaacacagacttggtcgtatcctgggcgacatatctcgccaactatacagcataaacaccctctctcgcgactccccactcgagacagcaatccgcctaacctcagaactcgaaaaatggaaagaaacagtcccaccattgttcaacagcgtccacccgaccagtttaattccacccctctgccgccaaagccaagtcctccaactcgcctactcgcacgccatgatccacgtcacccgctcatttctcttaaacgatttcacagacctcagccgcagaccgaaagtcccgcacccgatggtcagctcgcacgtccataaatgcatccaggctgccgaggacatcatgacaatagtcgatggtcttgcgcaccagggtgtactgatccagtccttctggttcacacactacgtgtgtttctgtgctgttctggtcatttacatccataccatccaacagcaccgtaagtcaatgggcggatctagctcagcctctgtctcttcggtcggaagtccccgtgacccagataaattacgccagctcttttctctcgctgaatcttgtcagcaacatcttgccgaggccacgcgcaagaactgtccgagccgtcgctacgggattatcctggaggagttgagacaggaggttcatcggcagatatctaatgggctctcggttgaaactcaggctcattctggtgcaaatgttactctctatgtttcgggagagggttcacaaactacggatgtaaaatcggtactctttgatactcagggggttgatttcatgatgcaaccacccgatttgggaacgaatccgggtgatgatgcaggcttccttgagagccttgagggatcaatctggtgggctcaacttgactcatgggtatgtattatgcttttcttgacgatacgagtacggaatatcactcgcctatacacatcttgtttaactttgttctaggccttgtccaatctccctaatgatccctcgacatttagcttttaagcactggatcctacgagtcacaaagcaaaatcgcgttcaatttcagatatcctgctacagttcgtatcacattctggacattattccgtcaagacgctatccggtgtggcgctcaatactgcatgagaccaccgcggtgaatgttctccaagtagtcatcgaatttcgccgacacctcaatcacattcttgaggtgatcatacgtgagaacttcccttttccacttcgcgtactgacgagcagtggtgacggcattccgaatttgccgaccattcaacttctctttctgaagcacatccaagctccccataagattttcaacgtcaacggcatcgttatcgaactcatcaaggcgcttgatgaaagtattccaaatgatccgtctctgctcctcatccagggggggatagtgcagtgccagctggatgcgcgacttgaatgcctcgtcaaaggtacctacccggttggtggtcaagatcaggattccatcgaaatactccaccacgcgcaggaatgccgacacgagcgcattccggttcagatcttccagaccgcgttgctcgagaaacacgtctgcttcatcgagcaagactacgcagttccaggtcttgcccaggtgtagcacggactcgaggtacttctccacctcctctggcttgatgccgacatcgccgcatgtgactcgatacagaggccgctcggctatttcggccacactctccgcagtcagggttttgcctgtacctgggccaccgtgcagaagcaaaataagcccgtttccttttccagcgatcagatcggcggagtattcaggctcgacgtggttggtcaccaatgcttcgataaggtctctcgatttggaatcgatggctagactctcgaaagcgtttttattccactcgacaggtgagatgcggtcgactgagagctcgaaccatttcttgcgccggaggttgaagccagtcatcctcggaggcatcatcatgctgaacggctcttgcgggggttgctccctggccatgactcggtcatcaagtgtctttctaggtgagctgttattcaaatacccggtcgaggctgggtgcagtctgttgtatgtcttcatatctatgatatatcggtcatcggtctagtagcaatatttagctcggctcattattgcaggttaaacaataaacacataccatggtctggaagttctcttcctcggtcgcctgatatgacacgtacttctgcgtgcggaatgtccagaagatctccccacggcgctgaagcttccggacgatataatcaggcgcatacctgattgggaataccgcaagatccgtgatagcacactctttttctgagtcactgtggtgtagtggaaggctataatcacgcaacgaatcacccacttcaggcgacgatggcatctgcgtggcgtgctgtggctttgggatttcaaaactgagcttagtccgagttttatagaagtcgccatcgaagtcccaggtctggacactgatccaccaacaaggattgctgccatggatgtctgggcttctagagggccatccattggctacataacctatgtgctccttgtttttgtccgaaaccaggacttcattgggcttgaatagatattgaacgtactccgggcggattttgcccttcttcaaaagcaaatccactgcagtgtattcattgccgtaagcctcttggacatagtctatgaagaggtcaaattgtctctgtgcctcagagctcagccctcgtttgatttccgattgtccagtaccccggttatggtagacgaagagataaggcgacctgacctcacccgtgtggtggtagtcgttgtacatggctcgaaactcttcgcccccgaggaagtctgcgatcacgtctttgagaccttcggaaactggaagaatggtctcgctgaatggctctggcttgccgtactttgtgttgggtgactgcggctcggctcttcttttgtagttgcggaagacaacaaaagatatctctctattgagcgcgaggtaaagctcgaaattgaccagagggtcattgcagcgcagatatggcgcacccatgtttcggtggatgagttcaggaggatcggtataaatccccatccatggagacgcgggtgtagacccgcgcggcctgtgtctggggctgaattcatcgtcactatcgtccatgctctgattgtcactcggataggtgccgtctttctctatccgataaaggatctgatactttgaggctgtgggcagggcaggctttccttccagctctcggactttgtttcgaagcgcttcgatttgagccttgaggtcattcgcctctgacagagagacgcttccttggctgggaggagtatatgtctctgagcgaacggtgtttgagtactgcgggttcgtatcatacgaattcacagactgtggactcagaatctgttgccttgcaggagggtaaagggcgttggtatggtgaaccgggacttgagggtattgataaggcataggacccgggggaaaatggccttgcattttttgattgttgactacctgcccgaaaggatggacaggattattatgctcgactggccaatggcggaacgtagtcgcgttgtttcgtcgtgcgacgttctcccgttctaacagcatcagtttgaatgagtaatcttggttgtttttattttcttgcatcgttctgggattcggaatataagatgtaccatcaaggaaaggaggagctcttcctccgagggaagcatggaccgattgctcttgtgaggcgtctttaccggtcaaatcttgggagatggtgctttccatgtacagctcatcaagaggccgagctagaaatgattgagagtacattgcccagagatgacaaggatcgtttcaggacaaatcaaatggactgtttcactgtccagagggagtgggaaacagacaataaataggtgaaattggggggatacgaggagattttgatcccaaccgccccgcgtcttgagcctctggactgtcatgtgctgtggctgtgtatatgtgcatgttcttgttgttgggctggtatattttcatgtacaggtacctaactcttggatgttagtgtcttgtatatctccatgtttgtttcatcaagacgttgggtggcgcttaccctctttcgtagttgccagccctaataacatgggttcctactacagacaccggagctttatgcttcacattccatgattgatgcttcatacatctgattcaatatattgttaaagcctacgcatgtttcattcaacgctcattggctctggaaggcaaatatgacagcctccagtgagaaagatccaacccgacgaagtcttttcaatctcttgatcccaactaaagttgtcgtctctggaaagccagatacatctccaaccgattctgcggcaacggaaagcccagtatcggagccaattatcccaaggggggggaaagatcggctaagggctcgtttgactcgcagtggctccaagattctactgttgctaggcttacgtggttcatcccaaagtgagtgatggtgtctttcttgttatagcagaccattcactgactctccgcaggcaacaaagggtctagcgtcgacattgattgctgtgattcggtgcaggccgacgaaagcacaggtctctcgaacccatcctccccatgtggtaatggcgataatcgcccggcatatctgactgcagctgagtctgtacaaagtgaactattacctgccactcttttgcgcagcacccccacccagggggtggaaactttgtctgagccacttcccgacctacggccacccgagagtcagggtgagtcggctgttgtcgacgacgtgcagcaacatagctcaagtggggaacccctgtcaactagtgtcactgaacagccgagtccaacaaattctaaattcgtcgatcgcttctcgcacaagatctcgctagcgtttggtcagcccactgtcatccgccgtgtgcatcttcggtcacgaccgagtgttcttcccgccaattctccggtattagacggtctctgtaagcagagtgatggcgctaatgatagctccagcccatcaaccagccccagtagtggtgggtctcctgccggcgggcagtcaacttcactgactccgctcacgtccgtggggccgtctccttcctcggataaaggcaagctgcccgacggacacgaaactgcagtgatacattggccctctcttaccgagatcaatgaagcttccaatgcttcagacaaaaatgtaatcacaatatcgccgtcgatcaaaactgtggaagcgacatcagtggcaaaagtttacttggaactatacttcaactccatttttcaaaacaaagatccccgtcagcaacgtcagctcgagttggagcagcatatctatgcgtttgagctcacacccgaggaacggctgatgacaagacacaactgggtcttacgagagaacgattatcttcgacaatgccgtgtgctcaaatcaaaccgatactgcactcaaaccgaagacgccatctccatcgcaggttacaaagctataaaggtattggggaaaggaagctttggtgttgtgcgtcttgttcgacggaatagctgtgattcaaggagttcccaggaagatgaccctcttactctcaaagacaacaatgtccacgctagatcaaatccttttggagctctgatgtctgccatggaaggtgccagacaaacccgtcgaaggtacatgaccggcgaaaagaaggaggtatatgccatgaaagtcatcaaaaaggccgagatgatccgcaactcccaggaaggccatattcgcgcggaaagagacttccttgttgcatctgagaactctcgctgggttgttcctttaatcgctagctttcaaaatgccaccaatctatatcttgtgatggattacatggtgggtggagactttttggggctactgatccgcaaagatacactccgcgaggactggacacgattttatatcgcggagatgatattgtgcattgaggaggcacatcgactttgctggattcatcgcgatgtcaagcctgataactttctcatctctgcgtccggccatttgaaaatttccgactttggtctcgctttcaatgggcattggtcgcatgaccaagcttattataacagccatcgctactctttgctggagaagcttggcatcgatgtcaagggtgattccgaggaccaagaggcgtctgctgaagcgaaagaactcgctcctgatataaagttgcacattgtggatgaccatgctcttcatcagccatcctcagcaagtctgttggattggagaaacaacaatgggcgacgcagattcgcaagaagtgttgttggaactagtcaatacatggcacccgagctcattcgcggtgaaatgtatgatggacgatgcgattggtggagcttgggtattattctatacgaggtaggtctctcgatattctctttttgtgtgtatgaaagtctcatagctctcccagtgtctatatggtttcacacccttcgcttgtgaaaatcgccatgatacaaagatcaagatccttgtgagtaccttcttttcccttgctccagtgaacatttcattctaagacttctcagcaacactcgagaactctacgatttccgcgggagaaattcacagacaagttagtctcacaagatgccatggatctgattatcaggatactccaagagcgcgaatatcgcctgtgctctccaaagtaccaagccaatgatatactgaatggacgtcctgtctcgacccaattgctctactccatggacgcgcggtacagaaacatcgcgagttactacgtatatcccaacgatgcagcagacatcaagattcatccattcttccgaggtatccgatggcaagatctccacatgtgtcaaccaccaatgatccctagggtcaggaactgggaggacactagatattttgacgactggaagttggccagcaatggtgtcgaggaagctgttaatagtgactcagaggatccagaccaagaacctcacgcgattactcccgaaaatcaagaaataagaccagcagaggacgctatcgagccgccagctgctaaaactaccccaggtgtagcaaaggaggcaaaagacaccgagaagaaaaaggagaagaaacggccccgcgataaaatcctccgagacaaacagataagcaagacggtcttggacattcggaaaaagggcgcttttctggggtacacataccgacgaccgaacgatgttgcgttggccttcagcacagagcgagggcgtcaaccgtatgccagaggccaattggccgacctgtatgcatcatgactatacaaggcaaatacgtggaattgggagttgaggaccaaacatgtcggccattgcattcccattcacacgacccaccaccgtccttttacagggccgaacatatccatataaccttcttttcatcttgtatagcgcctcattccctcataggtgcctgttcggaattacaggacttcactctccctcttatgtatccttaggaataaatatataattacggaaagatgttagcctactacacactagaagtattgtcatcagagtacattctatttcctatgatacttcatggtagataaatgaagtaaaacacccaaaagaaaaagaaaaaacgctgggaaattcgtacacacagcaaggagaaagcggctatgtacggtctcaaatcacatctggtggatagaaaaccggggtatcggagagtaagttcgggacagagaggctttcaaggggtatcaagttcagagtagatggaaatgaagaggggaaatgagtaaggaaatagacgcagaagaggaaaagccaaaacgaaccgagtttacagaaccggcgcgctcatggagaaagccgaatccgtgacacgatcctcgggcttcatagtaccattgagcaatggacagagtttcttgtttgttttgatgtgcccgacctggccgcagttggcacacttgcgctgagtaccagcaggcttgccgtccgggtcaccggaacgagggatgcccttttgcttctcgcgggcgaaacgacgctccttgttgcggttgagacggccgagctcggcctcgatcaacttccggttacgggcgtcgagttctgtatcgcccgtgggttcgagagattccagctttatgtgcatggcttcgtgttggtgacggtattggatatagtgcctgatcactcgaggatcgaaaacatgttgttcctgatgaagaatttcgccgttttcctgtctgatctggcgggtgatacgcagcactttgccgcgctggctgttgaaactcagtttgctgaactgacttgttgtctcatcgtcgcgacgatatggtccaggtgtctgcgcttcggatcgaggtgttggtttgttgaattgatcctggtattcgtcttcttgatccacgtcgctttcctggtcggaatgctcgatggtggaggacagactgcttttttgagcatcccaaatccgacgaatggatgtttcgtaagatttttgctggcgggcaacattgtagctgtgacctccaagctctttaagtcgctgcgcgtccagcttatcctcaacactttcaccgatagccttgaaaccacccttcatgcttgttttgatgaagttataaccctcaccacggccagtaggatctccttcgccatgaagtttcagcatcgccttgccttgagaggccaataaaaagttgcgagttgccttccacggagccatctgctgctcgaagctctcgaattcttcatcttcttcgttatcgccgccggtctcggcatcgttgccataaccagtgtcgtggagatgttgctgtccaatctgcatggattccagaagacaaacatcttcgggctggacccatgagcggattgtgtcttggtcggggagaattggatccagtggcttccaatacttagtgtccttgtcgtgttgaaggaaatccttgaccttctgtcggttctgcatatccgtggtgtttggtatgtgagctgtaacatcgctgattgcaagtcgctcatccgggctcttcttcaacaaacgatataccagcatcttcatgcgattcttggcgacagttgtcaccttgcgcgaatgaggtccaggaatgtctacagatgggaattgctgtccggcaacgtagaaattttcgatgttacgcaggtaatagctagagccatcgaatccagtggtactgcggaccacgaggaagtccgtagatttggtctggtgcgggaatagcggtgctcggtacatggagtttgaaattgccggggaaatttcgccggggtcgacatggccaaagattgagtaggggctcttgtcttgaggtaagagaacaaccgtttccccgatatctgcccttgggcgagtgggatcatcaatattctttcgccggtaataattgatgaaacggttgcacattccaaagttggctagtgtcatgggcagctcctcggagtactccactagcaagacattggagttgtctgacatggacaatgcctttgtggaattatagatagttttcgcatctttgccacgtaagtgcttgcgtcgcacctgggtagggttcttgacccaagacgtttgcccaggtcggaaggccaaagcaggtcggtggaaagatctagcttcagccttggccaactcagtcttgtagtagggccattgcaaacgcagggctggcagaccgtgctcaagtgtcacattgccaagagtactgcggatcttgttctgatgattctgtttgagcatgtcgtatgcttgatcattcgaaatgttgtagcgctgggtgagacggcgcgtcagattcaggtctacttcatccctggtgcgaggagctgcgtgtttcggcttgtttgcgacggcatccgctcttaattcgtccacaagaatgttcggatcattgagatcaattgtcactcgctttgcgattttcattgtcgcttgttctgggtcatccaatagtggaatatcgatatgtgatagagcaatgacatccatcggcgtcgggccggtctttcgtttcttgttcggaacctcggtttccatcagccaatccgcttcatcctcatcaaatgtatcatcttttctttgtgccaatggctgctcttccgggtcaatgctggagacgtcatccttaacatcccagtccacacaaatcgttcgaaggtcctgcatggtgaagccacccggaagtacctcatctccatccagatcatccaggtcaatgtcttccttcgtatcctcatccccctctgctccctcctcttcacggtccgattgtgtaatcatcaccaagccatgagtttcatgatcgaggccacgcttgaggagttgcccggttctgaatgcacgctcatgatcagctgccagctcaatattcactttggtgggcaagacgggcttaggaggcttggccggctgttttccaatgaagatagccttcttgtggggaatcaactcgagccaacgtggaagagtgttccggtcgaacgagggaaacaaggaatgcaaaagctcttcgtggttctcgggtggtgcaggtgggttttcaacccctgacatggcgaacaactgctgctgtagtttccatgcgcggagttcgacgggattcatgtcttccgacatgatactgtcatcatccgggaattcatcttcctccatgataggtggctctggctgcaattccggggccgacgggatgggtggtagttcaacgggcgcatctgtcaagggcatgtcttcgtcttcgaagaggccgcgggtaggatcatcctgtccagcaggaggcggcgaaaaagaaccttcgccaaagagatcatcgagattgtcatcctgggtctgagccccctctcccgggtcgccgaagagatcgtcgccgtttccgaaaagagcagcatcgtctgagcccaagttcgcgaaaggatcttgattatcatccactgcaggcagggctggagctgggcgtgtcgtctcttcttcctccggaagttcatcgtcgtcgaagtcctcgtagtcgattgcatcttcggctttttcaccaacttccagatcacgcgacaagaaatctagagaggggccagtatcttcgtagttgttcagttgtcgcatcacatcgtcgaaatcggtatcatcctcgcccccgggggcctttggtgttgcgtgaggcatgatgggcgagtaggcgtgtgtttaagatgagagaagtgttgtaaatgaaaaaagcgttagattcggcaaggttggtgagagaaatcgtaggttaagaatgtaggcgcgagccggacaaggcgacaacgcgatttaaaatatgcacatctgggtattatgcgagtctgcagtttggatgtcggtgttgccgtggctcagactgcgcaggagagagaagaggaggggcgtgtcggacaggtggtcgtagagggaaaacggcgggtttccaggatactgcgcaagggaccgggtcacgctaacccgataaggcaatcagctcgatgcctgaagtccaatacttgagggctcaatagcatcttttcaacgacaatgaagaacaataggaataaaaattttaatcggagttagaaatacatttgaatttattgtcatgaatagcaaccataagtcatgtcacattgaaatccccatagaaaatacacaacgccttgcttgcaccctccatgcaatagtgcattactgtagccttgttaccgtcaggaaccagttttgcaatttgtgccaaatcagaggtccttggaatgtaaaggaccatgtgcttgctgaatgctgagtattcatcatacaatcgttggagggaatatggctccatggttttcaggttgaatacctgatctgaacgatatcccgggcctgctacaatcagttcatgtcgcagaagtaacgattcggtgacacttacctccccagggagggctggcgaagacgagactgtacggcgccagttctttgagttgattcttgagaatctcgaaacaatcgccttcgaaccaagtgatcttgtcctccaccccatagattttcgcattatgctttgcgcacttcagcacagcggggtttttttcgatcgcgtagattcgtttccattttccggtcaaagcaaatgcaatggtgttacctcctgcgccagcgaaggcgtccacgagaatactgcgcccagcaggcgctgattcggcaatctgcgaagctatagtgctaaacaaatattagcagaaattctggcataatcgaaaagagtcacaaactttgcgactggttctggtgtgacaccaaaccaagcatcatcggtcaaccatacgccatcatcgtacttggaaaagatccgatagcgttgcgcccagtagctgataattaggttagcattggtattttttaatgatgatgacacttacttctggatgtcccagggcacttcatgcaagctgctgtagtgatgcacctctggaggcgcgtcttcatctgccatgatacaatgcagcgataaagcgaaatgatccatcgattctcgataactgataatgggtggtgtttgcatggtttgcacctgcctatctggccagctcgcacgaggtaaacacaccggctacagcttccctattcagcctcattcgatcccctctcacactcttaattctagcaaataattatgttcggcgcattaaatcgcttcatcggccggctagatggggagcctggccaacagcctcgcagcggccccagtgacaacgcattcggtttccaggtcctccgcaacaaagaccgggatctgcctttagagccatggtttgactttatagttggtatcaacggtcatacaattgtaagcatatgggatcattcaactcccggcattatagcttcgctcacactgacaaacaggaagatccggacccaaacctctttgcgacagaatgccgaaattgcgctgggggaagcttgacacttgaagtgtggagtgcaaaggtagggatactaagatgatacttctagattccagctgaatttatatcctaccagggtcaacgaacacacacaatcactcatcctataccgccaacgaacccctcgctcggcctcgcgctacagcttgcccctctctcttccacgcaaaacatctggcatgttattgcaatcccatcgcctctcagccccgcataccgagccggattgcttccttactcagactatattattggaactcccagcgggacgttaagaggggagtctgcactcggggagttggttgaagaccatctaaaccgcacgctggttctgtgggtttacaacagcgaatttgatgttgttcgcgaggtcgagctcgttcctaccaggggctggggtggcgaaggcgcccttggtgcagagttgggatacggtgctcttcaccgactacccattggactcggagaagcagttgagggaccgggggaggttgtattcgagacacgcgaggacgccactacttccccagatacatcagctcctacgggtaacttcatagtcccagcaaacatggcagcgccgccgcctctagccttcgctcaagcaagagttgcgtcgccattacagagcagatcgcccgccgggcgtcgtgcagggaaatcacggtccatggcatcgcccaatagagcctttgatgattactttgctgagggtgaagagaaaagtcgggagcaagactatgcgccgtcacggcatggaactcctctacctccaccaccgaaggcaggagtctcgccctctcactcggggagccctgcgccggaaggaggaccaggacctacagaggaagaatgaatgatggcttaagaatccgaaaccaatttaatatggagtatgatgaaatcaaattatgtcgatcgtcgtgaatgcaaatgggttttgcaacattctatatcttaacaggtcagcgagtttgtactttaactttcctataacagatctagccatgatcaatctaagaagcgagtgaagcagaggttcataggtaagctagccgacttagttgaagctgaaatctcaataaccaagggatgcatggtattgatatgcttcttatttggcctggatattgccaacccacaaacacaacactagagaccatcggcggagtactaacgatgtctggagaatgacaacgaccacgcaagataactagactgtattgaccttggacgagccgctctcaacttcaatcttgcagaaccatggatgggataagatttcggcaggtgaaggtcttttcgcgggatcatattgcaaaatccatcgaaggagcgccttcacttcgtgagcttcctcctcatcaaaatccgggcatgcccgatcgaatgactcttctatggatggctcctctaaaataagcggttcctttcccggacggacccctccaagctcctcattgaagagcttcctctcaggcgtgaagtagagcgacgatcttgtctaacggctaaagagctcgtctgggagatcgccgagtagtgatgtgatatagtgagttcctttaactagagcgactttagcgatgtggtgtaagattcttagctcggttgtcgatcccgagatttgagacataaggatctttagggcgatatatctactatttcttagaggggatgagtaacgataatctatagtatcgggggtaaagatacacagaatgaacttacttcatgttataggcgagctaaaccgttgagtaggagccctcgctcagcttccggatgaccttgtactgttggttgaagacgtcgccaagaacgactggatgataactatatgggtggtaatcctccacccactcatagagtgatgtaatatctttgaatctccgttcgtcatctattgggccacttgatggcggagtgggaggagaagaggtactcatggctgcgatgtagaatggagaagaccaaactcgagagaaactgagaagacgttcccaaagagcgttggccaaagcctccgtggtacgtttatgctcgtctacatgaacgagtttcggaacttatgaccacacaattcaaacaaaggaatcaatccggttatgtcttcggatctaggagtttctaagcgtacatatgcaacaaataaatccatctatagccccaaacagtcgggctatatttagtggcccttgctcaccagctcttccaacttcttgcgggtgttaccaatcttttcctccatcatctggcgcgccattccgctgtgcgcaattccggtgtaccagatgtgctccgcgcgctcacgagcagccaagtgcttgtccgcaagcgcagggaccttcttctcgtactcccaaaccaaatctccgacattccgcatggtcacgggcaggaggctgtaggcggcagcagtaccgaaagcgagcggcgacgcagtgcgcaggaagatgccacggttacgcgagacgattgagccggccatggcggccacgacgacgtagacaccgccgggcaaaagacgctcgccggactcggcagaaggcgcgagcgaggcaacggtgttggtgaagcagttttcgatgttgagggcccgagacaggaagttgttgaagccctgctctgcggcgagagagtgtgagtagaggaaaaggcgagcttgtcggacctgagcggtcaggatgtctgtcggggtgggcgaagagggagcttgttgcgcagccggcgcagagatcgacttcggggtagcaggcgcagcaggctgcggaagcttggaggtttcaggaatgtcggcgggcaagtcatcgtagatgggtttccgctatattaggaaagcagtcgtgtgtcagaccaagccttttcagacattcaatagagctaggaacagatctggtcatacatagtctcggggctcttctgcgaaagcggtattcttaggatacagagccatacctcccgcgaggagagtggctgcgatcggagccacagcccgctgggaacaagtcagcataggaacggcacattggggatcaattgaatccaacttgaaagaaggcagttatacaagggcatacctgttgcaacatcggccggaatgacatcctgagggtgtggggaagaggagaaggggggcgagctggtagtgaggatgaagcaaagtcgtgttggagcaggacgggaattcttcggctcggcggaacctccagaaaactccgtcattgtccgttctccttgactctagatttctttcggcaggggatttgtgaatctgcaatttccgatggttttcatctgcttttaatacagtctctacaatgcttcgccctttgcgacgaacatggacatgtcgcaaatgcctactgcggccccaatatcgagccttcgagagcgccgcatcttccccgtcaacgtcgttcgagtatattccagcggataacagttcaccaagaaagaagaccgacgaccatactctacggcgagtttttgattcccaaccgttttggaatgaattctcccagcagcgcacgacctccgtcccaaagcgagctggattggtccaaaatcaatacctgacaagtcccgagggctttaggacattcgctaatgtctcgctacaaagatgccaggctattgtagccaaggtgcttgcggcctcgacggttgaagaatacagggcccttgcacgcgaccttgaccagctgagcgatctcctgtgtcgtgtcatcgacttgtccgacttcattcgaaccattcaccccgatccgagaatacaggaagcagccacgcaggcgtgggctcttatgtttgaatatatgaacgttttgaacacaaccacggggcttcatgaccaactcaataaggccttgaacaaccccgacgtgacatcatattggaccgaggcagaacggatcgtggcacagatcctcaacaaggatttctcgaactctgcaattcacatgccgcccaatgtgaggcagcggtttgtaaatctctcaaatgatgtgagccagttgggttccgattttatgaatggggcggagcctgcaagatcccaggtggtctttggtgccaatagcctccaaggcttggatcctatggttgtctccaagctcaagcgatggaataagaaagcgccagttccgactacaggtattgtccctcgactcgttctgcgctcggtacatgatgaagaagttcgcaaagagatgtatatcgcgactcgaacatccagcaagcgccaaattcaaagactggaggaacttttggtgaagagggcagagttggcacaacttacaggctataatagcttcgcgcacatgactctcggcgacaaaatggccaagacgcccgaagcagtatcaaactttttgacttcgcttgtgtcaagcaaccaaggtctagtccgggaagaactatctaagctgcaggccttgaagggagactccgcccttcaaccctgggaccacgcatactacgttcacaagcgcgttttggattattccctagctcgtcgctctcgtcacatgggtgttgtcaacgagttcttttctttggggacagtgatgcaaggtctctctcgactgtttgaccgtttgtatggtgtacgtctagttccccatgaagcatctcccggcgagacttggcatcccgacgtccgtcgattggatgtggtggatgaatcggagaatcacattgcagtcgtctactgcgacctatttacacggccgagcaaacacccgaacccggctcactttactctgcgctgctcgcgcgaaatctctccagaggagatcgccgagtgtgcgtctatgaacgaatctgcgcacccgaacgatggcatggccactggtgtagatccgcagactaacactctgcgccaacttccaaccatcgccctcgtgtgtgatttccaggaacctcaggccaatggcagcggccagccaactctcttgagtgagcagagtgttcgcactttgttccacgagatgggccacgctgtccactccatcctgggccaaacgcctctacagtccatctccggtactcggtgcgccacggacttcgccgaacttccttccgtattgatggagagctttgcgactgcgccagaggtgctgcgcctctacgcgcgacactggaagaccgacgagcctttgtctgagagcatgatgcagagcatggagctagaccgcactgcgcacgggtccatctacggcgccgttgagaatgaagcacagatcctcatggctctcgtcgatcaggcatatcattcgatcccagccgaagtcagctccgctggcattgattccaccgatatctaccatcgagtcttttccgagtattccagtctacccgagccgaacaatattccgcgcacttcttggcagggcttcttcggccacttgtatggttacggtgccacctactatagctatatatttgatcgcgcgatcgcaaacaaactctggcaggacgtcttcctgtctggtcatgcggcaactgaccgtgccgccggtgagcgatacaagaacgaagtcctccgttggggtggtggccgcaatggctggcagtgtgtggccggtgtcctgggagacaagaacccctccaatgccaacggacggttagctgaaggtggcgacgaggccatgcgtgaggttggccgctggggcctcgggcgtgaaggcgtgtccggataatgtgacacgaatgtacttttattgcctttgacacataccttggagggttttgtaaataaacatattttcacgatttgatttgatcttctgaccgcaattaaactagcatgcattggatgtaatgtccgagactagcccacagctaagccgcgccaccagtgttggcgttgtcggcgttgtcggttatggcggggacggtgattggaatgtctcactgtcccccctttgtttggtctatcacgaaacactctcggtactccagggctggattgcaagctccagatgtcgtttattatgcttgagaagtcttccaagtaggcaaaggaactggaaatgataatttttcagtatacgaggcaactggacttcccagacaagccttatcgcacgttttgccctctgacgtctttcacttgcactatgcatggtggcttgtttagcggctgctatgcgatgataacaggtagcgtcgaactggttgtttatattgaggttatctcctaggcagagcacatgctagatctcagggaaatagattaacagacggtctgttcacctgatcctcttaatcttataaaataccaggcctgatcgtctagaccttatcttctttgttctgcaatttgcaataaatacggaggacctacgttcacttcgtggtaattgaccgctgtctctgactcgttgtatcggatattgcggtttcagcctctgtccctgctcaatcaaactgatatttggcgagaaattatttattcccttggccttcgatcttcctctcgcaaatcaccattcattcaagttcagtctacgcattcaaaatgcctgatatccttattgtcaatgacaatgcttcattcgcttctagcgataccttctctacccaagattcgatagagcaaccacggaccccactccgtcgaagaaatacagttgcaacgctcacacgaaaagtttctcagaggataacaaataaaatcctcaggggcggcgtccaagaacatgcactcagcgaaaaaaatctcaaatatctcaatgacgcaacagatgttgacccaccagatcatgcgatccacgaggtccaaatatacgaccggatttacgaagccattgaagaggaatgccctgttttcgacgtagaagcagcgagggagatgcgtctgcatcagtcatactctgccttctgtcaaaacttcacgctatcggggacaacacggacgaccaggaaattcgacttgtcaatgggaccagagtgggccggggaacatccggagtttccccttgacgaaaccctcgaaaccaatgacacgcttcaattcccgggttctcattcctatcccgaacacataacggtgcatccaaagccccgagcaagcacagtcgaattcccaatatcacacccatccacagatctcgacgcatcacacccagtgacgactgtcgagaggtcaccttcggaatggcccgtcacagacacgccaaatatcgaggaagacttcgaccggatcagttcaagctttgagataacgcccaactccaactccaactacctccaaccaccgcctcatatcatcaccccaactgtctggatggacatgcagcgcatcgagcgggaacgaaaggcagctcgacggcagagactcctcaatccgttccggtcgtggtttatggcaagccaacccctcgtgggggcggaacgatgaagtcgtcgactaacgggttcgactaacgggttcgactaacgggttcgactaacgggttcgactaacgggttcgaataacgggttctgctgtcagacaaagcacggctgggctgagacatcggtttggtttcaaatttgctggttggattttcaatggatttccatcttaattaaacaatcatatttgctttttgctttgaatcatatttatcacggtgcatagcgacctcgggatcactagggactttggttctattggcttctatttcaagcagaaatttgccatttccaaattattatagcgtagcatcattgactatgttctcgattttaggtattaccaagattcgcccataagctgacgctaccccagccccgcggttcggctttcgcctcggaacgtgccatcggaacgtgtctgaactgggggatctacagaaactgggggaactgattccgcacacttcaattccaggctcagagtcgtcttcttaaataaacccagaaatggccttcttctttgtttgcttcgacttttctactcagtatctcgcttctgttgtatcacacaagttcaaaatataaccacatcatggctatccaccgcataataaccgatccagctgcccttctaattgtcggaacccttctcttccttgtctacctgatatatcaacgattcttgcatccgttggcaaaataccccgggccgtttcttgctgccttcacggacttaaacaagttctcgctgttcttgtctctgcgcattgaccaaagaatcttttctttgcatcaaaaatacggacctatcgtacgaatagctccaaacgagctcagcttctggaatcccgaggccgtcgccccaatctacaagtccggaaaggcaatggtcaaaagtccatttttcgatggattcaaaacattcaatccaagtctgtttgggaaccgagatgaaaaagtaagattcagacaaaacaaatgtgttctccgcaatgttctcacaaagaaaccaggttcacgccctgagacggcgacagatggcccatagtttctcgacgagatctttgactgatatggagtcgatttttgatcgacatgtcgaaaacttgcgtcggaagctagacaaatacgcggtatcgggagaccagtttgacctcaaggatctcattgccttttatggctatgatgtaattggggaactggccttcaatctcgatttccactcgcaggaaaaggacgaccccgagaatcttccccctataaatgaccatatccttctcggatgcttgtatggctctcttcccgggatcctgccttggtcaatgaatttgagcaagtatctgccgttttcatggctccgcaagttgctcgggagccggcaaaagattcgcagcacggtggcacaatgcgtggaggacaagacgagtgaatcttctggaaaaacacttctcacaaacctccagaaggcaaaagacccagaaacgggcgaggaattgtcaaatatcgaaatcaactccgaagcgtttggattccttgttgctggttcgcacactacatcagggaccttgactttattttttcaccatcttcttcacaaccccgacgttcggcgccggttggaggaggagatttgtcaaaagctgccgatcattgagcacggcgcctatccgtttcctgggctggagaaaatgttgccgtttatgacggcatgtatccgtgagaatttccgtcactcgccagtctttactatgccattgacacggactgtgatggatcatgcggggatgattatcgatggagaacggatccctcggggagtgagtgattttactattgatgtggaagactttgctaatttgtgtcaggtcaatgtgtccatctcgaactactcattgcaccacaatccgtccatttggggacctgatcatgacgaattcaaccctgatcgttggttggcttccgacggcacggcacaggataaattacagtatctaatgcatttcggagtgggtcataggatgtgcattggacgcaacattgcgacaataagtattgtcaagattatcacgactctatttcgatcctatgattttgacgtgatggataaggatgagcgccttgatgtcatgactgttggcattggtgagaaggaaggtccattgtggtgtcgtgtgagctggagagagtaacatgccaaggatgtgtgatcttcaaatgctcttggtgatggagcgtgttgtagtatcatatagcaatgttgcaaaaagtgaattttccgtctcatttttctggggcataagttcaaggcctaacatattcggttcattgaggctttttaatcagatagtagactaagcctgagttatgaattgccatagtttgaaagctcactacataaaatagatgctaaacttgccactaaaacgaaaatacaaacctccaatcccttcctaagctggggttgtaaactaatcggagccctttgaccatatggcttttccgagcgacaatgataggtttctactatatgtagtagttccatgagtgatacagagtagtattcaagttttaattcaaggcaaagctgaaacgaaagacggaaagtgcacacggaacttgacaatgcgtaacgggaagtgacgaacagtgcgggacagaaacgccgtcaataagccgacagcatatgtatcctataaactcttcatattggaaatacctagaagtaccagatccatttgaacaagaactttttcacacccattatgtctgccgaaattgacgtgcccagcaccgtaagtctagaattcgcatcaaattaaaccagacattgaagccaacatttctagctggatgcacaagctatacgtgttatcatcgttggagcaggactgggagggctggcctgtgccattgcgtgtcgtcgaggtgaacacccgctcgatgtaaccattctcgaacgatctgaagagctcttgcccgtcggcgcagggattcaaataccaccaaatgcaacaagagttatggcccatttcggccttatagaaaagctgaaaagggccggcgctatcactacggaggggtatacgctgagaagatatcgggatggacatacagttgctcaaaagccgttgtagtgacttatggtgctgaatagatgtctgtgccaagtaatcgagttagcttgcttgggatatgctaacgatattcggaaagggtcatacatagggctgactaccaagccttgcttcttgaagaagcaactaacgcaggtgcacatctagtcaaaaatgccgaagtggtcagcatcgagtcgtgtccagccgttgacatggttgtgctaaaggacggcagacgtttccatcccgacatgattattggtgcagacggtaagcatttcttggttcgaaagtgtccataaatcacagttggctaacactggcatcaggactttggtctacaatgcgggagttcattatggatgggccatctccacctctggaaacaggtgatttggcgtatcgtggcatgttttcgctccaagagctcactgtgttaaacgacccagatgtcgagaagcttgttgcagcatctgatgttcaggtctggatggggccggagaaacatgttgcgttttaccccatcagaaataaaacagaattcaatttggtattactgcaagtcacttcaccgcagataatgccaaagccctcagttgacagagtccagttgtccagatgacctacccaaaggatcacgaacgtcagagggcgatttgaaagagatgcgaagtcattttgacggatgggacccggcgtatgattaatacaagcccattgcacgatatgaactaatgcattgacagacttcggaccatgatctcttgtctccgcagagctttgaagtggaagctctgccaccacgaggagctccagagatggacaaaggcgagttattgatcgaatagtattatgttccttgaatctagtctgaccgtgaatagggtactgtgaccttgttaggcgacgcctgtcatcccactttgccataccaagcgcaaggggcggcaatggcagtcgaggatggtgctgtcttaggacagctcttgacgacggcacaaagtcgggcacttccaaattctgcgacggaatttcgtgcgatgattactgacattttaagtctctatgaaaggctgcggaaggagcgaaccgaaacaaacgtccttgggggcgtacagagtcgtgatttctatcacctttgcgatggaagcgagcaaatggaacgcgatcagatcttatccagactccctgattcacaatggacgggggattgcaaatggaactggggagatgctaaatatcaacagagccttcttgggttcgatgtactgggcgacgccgcacgcgagttcaatggccttgggttttagggctcgggaagaagtgagaagacctttttggggttgatactcgcaccccacttacctgttatgctatgttccactagaatgtaacaatcaaagcctacaaatacacgtttacgccgatcaaaagctatttataacaagtccaaagtacattctgctgcggaaacagtccgcctcttacgtaatatatctcgtgtcgatccacggctggacatatatatattctgccgggatgccttcagagctccgaccatacttacatcatcgtaatcatcccatctcaatgtgaattccagagttgttgtgagatcatgaataatgccacatccaagcggcgttctcgactcaaacccgactgtgagcgaaaacgaccaaagtatgtcttcaaagcgtgtgcatcatgcaaacgcagaaaagttcgctgtaacggcaaaactccttgcgagttctgtgagcgacgttcgatcaagtgttgctattcaaatgagtttgaatcatccacggatcatgcccaccatttgaatgatcgggagttaccgttggaggaaaagaacgttggccgatcggatattgtgtaagagctgtatgattcacatggcgatcgatcgctaattgcgcttcaaggccattgcagcagctgtctcaccttgtggcaactttgcaggataaggtcgagttattacatcacgaaatccaagatgttccgaaagagcgtttgtctagcgtcaagggtgatactgatactcagaaccacccgaagctgaaagatcttcgatctacctcaccatcactgcctgattatactggcccaaccagttctctcttcagcctcggcgttgcgaagatgattctagagcatggcaggccttccagcccagagaagctagatccggagatcgctggatcggtgataacgacaaacgagcaagacatgacgcaaatggaggcttgttcatcaactaaaacgggtagtagtgacctgggcctgctgagtgagattaacttgaacgaagctttccgcctcattcatctgtatgatgatatcgtaggcacgttgcttccgatagttgatatcgaaacaatcaaaatgcaagctaaaatgctgtgggcgaacatcatttacgaactgaatccgaatgatagttctggtggcctccgtgaatgcgatgccacccctttgaaaatggttatcgctattgctctgcttgctgagggtggtggctatagccgcgtggcgattgatctgcacgacagcctgctaccaaatgtattgccccatgccgtcttgagaaaattctccttacggggccagcagataatcctactgaatgtacgtgccgctacgcagtatcatattcgactctaatcgaacttgacaacaggccttgttttatatgttccaggatgactacagactcgcgtctcgaatgattactattggctcgcgcactattattgagtccggattacatcggaaaaaagttctttcggattatttcccacgtccagaggagcagaaggaaatcaccaccctgctctacacttctttcgttctcgatcggcaaataaacttcgcagctgggttgccgttcactttccgcgacaacgatatcgacattcccgaggtggttcgttttttctaatagctcgatgttaaatgaaaagggtcagcagactaataatagggactacaggaagacgttccatatctgaaagccatgagatcatatgtgcagtttggagcccaaatttggtattccatcacagatgaacacgggaaattcaagcgacggttgaaggaagaaacctttgactttttgagctacaaagtcaaatcatggcaagaaagtctccccaaagctctacagtcgtcccaagacgagctgggatctgtggagagcattcctttcgaggaccgaaaggcctatctcatcagatctatcctgttcctacgagcaaaccagatcaggattttggtcctacgtcctctactttactcataccaaacagcgaaagcgaatcccggccatgcagacacccttgtccaacttgcaacaaacacgatcaataaggttctcgagatggatcgtcaatccaatctatatcgcacacaaataccaattttgaatcatttcctttcatctgcgttgtgttccttgttccttgttcttgctcattattcacgcctttccaccacggagctcactacgagtgaaagtgccgccgtggtcgatgctattgctaatggcctaagcttactgcgaacttacctattctccctgtcttcacagcggttgctgcgaaagtttactgggccacagggcctgatatctcatcttgggcttctgaaaaactgcaatcactttgacaaattactcttggagaagcttgatattgacaaatttacgggtctagacaatgtcgcgctagatcgaaatccagtgatggagggtaatgatcatcctctgcatgattactccaatccgacaggaagtgagtggcctcttgaattatcattgccatccccagtcacgcccggagatataagccagctatttgctagctatgaattggacttcatgggattcaatctcttatgatcaatgcaacttgtgttttgtgactgtttccaagcagcttgcgcttgatactcttgtttttccgcaacactaaaaatcgacttccctctgaatcacaaaaattctaactcaggtgctgagttatgtttctatgtccgtaaatatacttttagacaaaaaacaaaaaaaaatggactcgcggggaatcgaaccccggaccactcccatgctaagggagtattataccactaaaccacaagcccagttcgatggaagaggccagcatttaatgctatatgaagtgaacttaatctacagcatgtctacggaagggttacgatgttccatactccctaagcatcaatgatatacagtaacatgtgtgtccggtagactaaatcccaagtccaatcattacatggcacctatggatcgtaaacaatcaatgtgatgcaaggaaaagctgatgaacatgctgtaggtatgtaaaaatcataacctgttacttcttactatgtatatatgcaccggttgatccgaaggcaaaatgacaatgtgtaaaatgtgtatgtacatgggacagaggaaggagcagcttcacaaacaaactctcgtaaaagaccagacatggtttaattccctgtcgcacggagtgaatatcactcaaagggggtatggagaaatagaagaattgcataggaaagaaaaagtagtggaaccagccgaatcgctaaaactgacagatgaagcatgggtcgaagcacataccgaaaaacaaggggaaaaggcccgttgtatgcaaataaaaattgatatggcgattctactcatgcgctgcttccaaatcggttcgtaagccaaccggcgagtcccccaacaccctcaccccggctagaccgacggttcctggattcccctccctctggtgtaggggacccgggtggtgacattcgagtggaaagccgactctgcaatgaagaagataatgaggatcgaccgctgcgcacagtgcgagcagaactgcgacgcggttgggatctcggctgctcaggactatcccggatcactaccggattctcaggggtgccttctccgcctctgtgagatataccgtcaactgagagtcgtcgttcatggatacgactcacatacttacgttgtatttgaattgatgctgcgccggcaatgcggacaagtgtcatgctgggtcagccatgcatggatgcagttgtaatgaaaccagtgagcgcatggtaacacagtgacttccaagccgagttcaacgttatccatgcaaatcgaacacactgcttttccttcagatcccatcatctcttcagtgatcttctgcttcggcaaagcttggacggcagcatcagatgctggcggtgccgcagtgctagtccctccaggattatcaaccagttgtgtgatgactcggtcgagctcctcctgcgaatagactgcatccccgcttcgactcatgttgagaagggcagacaatatcgaaagagcatgtgggcttgccgggttacgacctccacgtgagcgtcgtgtagtttgtactccaatgtcagcacgaatggcgtccatgattctagatttgattagtctggtgataatgcaacatagtagccaagtacatactcatttatgtctgtcgggttgcggttgacaggttgaggcgcatctgcattgcggggagagaggcctgggtgatggccagtaaggtggtcgtcctcgagccagtcgggagcggtagaggattgaggatggaaggggtcctctccaaagcctctgtaaccacgggcatttggctccattaaattttgaaaaattgtgtcaaagccgtgcatcatcatcggaaccacagggttcgggccattgttgcgctgaccagaaggccttccggtctcaagtgtcgcgctgctgaatgagaagcgaccgtccggcgatctgtatgtgcgcaaggaggaaaatggaggagtagcccttccgaaaaacccggggccttgctgttcttgcgtgtcttgttcccacggattgtggtctaaccatgggctaacgcgcgaaggcgatacggagtccgcacggcgtgagggggagccttcgggagatatttctggggggatttcaatctagaggaagcgaaagtgtcagaattaaataaaccaagagagaaagtattcgctgtactatttctgtgaactccgattgacaatgtgggcacgtcaaaaaatcaccatccttagtccaaaccccgccacaggcatggcataacatgcggtcgccagtgtccatgtcgcaatacagactgataatcacctagagattatgagatgttgtacaacgtagatgttatgattgaagctgatagaatcgataagcgccagaacagtcacgagtgccttatctgcggggagctggtcacagtcggttagatggccatatttatcggatgaggaagaacagaaagaacagaaagaacaggaagaacaggaagagacggggggttaatatttcacagatggtggtgagccaacgtgcaaggacaaaggatgattagagtgattaatcgagtgagcctccaaccggcggctggaaggaggcaatgacgttgatcagcaaatcgccgccatagcctgaacaaggcaaagggaaccgtcaaccatggacttgtatgaaacaaagaacactctaggtttcatacaaaattagaaaaccatgtgtttggcagccttgtctcctattgttgctcttgtttcaacgcctggtttcatatcggggaatctgtcgcgacgcaagggccaggaggcgaggtatacagctcatattactcaaaaagttaagcctccttttacaccggagagattaagactcaatcatatgatcaattcgtaaagaaactagtacaaagtgtataataaacagcaaaaaatggtcactttttccatgcagggatacaaattcctcgcgatcatctcatccctgccaaatgcactaggagagtgaactgaaaaaagagacagcaatggatatcacagatgcaattcaatcggtaacctcaaaacaccccgaaaacggatgacaacgtcgagcactttacttgatctcgaggagcttaacgtcgaagataagcttggagttggcgggaatgccggggagggccttcttgccgtatgcgagagaaggagggatggagatacgacgctcaccaccgacagccatgccggcgacaccgatgtcccaacccttgatgacctcgccctttccgagcttgaaggtgaaaggcttgcccttcttgttggagtcgaagaccttgccgtcctcgagcttgccgatgtagcgcatagcgacagtgttgccactcttggcagcaacaccctttccgagcttcttgtcgtccatcttgactccacggatctccttaacgccgagagtgccggtgggcttgtcgccggagggggtagggccctgctcgaggttcttggcgaactggaccttcttgtcggtcttggcctccttcttgtcatccttcttgtcctccttcttagcatccttcttgggctcaacagcggcggcatcgccgttgttcttcttgagcttcttctgctgggccttggtcaaggcgggctcctcagccttggtagacttggccttgttggccttagccatcagatcgtcgaggctgacctcatcctcagcagcgcgcttgttcttgcccttcttggactcaacaagcttaggagcctcgtcctcgctctcaacctcggtgattctagggtcctcaatgtcatcaaggtcatcgctctcatcaccatcctgcatggccaagagatcttccatgtcaagctcatcctcatcgggagacagatcgtagtcatcctcctcctcatcgtggtcatggtcatggttgtgttcatcaagaccaatgacgtagttaccggttaggaagacagtgtggttaccggtgaccttgaagaacacgggctcaccctcgcagacagtgatgtccaggggctgttggtagttctacagaggtattaaacgtcaatattcaaccgattgtgaaactcaagagggtgttcgccttacctggctggggctgagggtgcagataacgctctcatcgagctccaggccctcctcagactcagagtcctcatcgtcaagggcaggacccttacccttgatgagcttggagatggcagcctttaggtcgaagtcctcctcatcgtcctcctcctcatcatcttcctccatggcgtcctcgaggtccttgagggcggcagctgccttgagcttgcgggccttctccttgtcgctaggaccaccgttggactcctcctcgtcatcggagtcctcttcatcctcatcactgtagtcctcatcatcctcgtcatcctcatcgagaagaccaggaggaccgcgaacaatcttcaaagtggaacgggaaggcttgctcgagtcctggtcatcctcgtactctggggcctcatcggggtcgatagcggccatgctgatgcggaactatatttaatgtcagcacaagctgttagccaattgatgattacagtaagactgaccgaagcagcagcgttggggactgcttggaccatcgcaccgggaggaacccggagcgcatagactgcgacaggctgaacagcagacattgtgagtaaaataaagtgacgaaggtgaagaagatcaagttcaaaaatagaatgaaccacgtggaaaaggatgtggatggaaaggaaagaaaagagaaaagaaaagatgctcccaagcaacagatacggcaaaaaaattggagaaaaaaatattgatcaatgagatcaactaaccgttcaccgctggtgtattgccgtgagtgaccgcttccttgaagcttggatccacgtgatggttgccaagcttcgcgcgaaagggcaacatccttttctttacactctcttcttagtcatgatggtagttgtagcccaaaatgggctcccgtcatgagatcaactctagtgcagtgcgcaaacgcattgaaaatcgtacgtttagtctaaatatcaatttccacttttatctgaccatgtctagatgaatttgacgatgaaagaggagaggagtatgaggcctccagcttcggcgggtttggggactacatgcgccggaaaaagatgaagttgcagaatcttgacgcagaaattcgagcatcagctggtgattgcccgccaatattccgtggtgtggttgcccatatcaatgggtacactcaaccttccctgcaagagctgcaccgtttgattgtcagccatgggggtggcttccttcaatatctggatggcaagacagcagctactcatatcattgccactgctctgacccccaagaagcgtgaagagttccgccgctaccgcatagtgaaacctacgtgggtgacagacagtatcaaagcaggacgtctgctgccatgggatgaatttagaatagtagacgagggtgaagcgcaaagagtgctcaagtttgataatggccggtttatcagccagacgaatagccctcgcgcacgttacaatgaccaatcgaggtctagcaggtatagctttcagctcagagatatgagcacaacagaagaagggatcggctcttcatcgaagtccgtgacttcatctattcggtcgaaagcctcacatatgatcacaccaaccatgccgagccagccatctcagtcggactatggcgacttccctagcttcactatggagaacgaggaggaatatcatgaccctgagcacgaacaagctctagccagtgacatagcacaatctataataccacatcaaactcccaattcagatcaagtgcccacttcaccagatccactggttgacctcgaatcaacaacctcgcctctcgaccaaacaagtccaacaaaacccgctttaacttctgaagaatacaatgcgcagctcctgtccgacccaaggatgcagaagtcatctgttgtcaatccagaattcctgcagcagtattatagggagtctcgcctgcatcatctgtcaacctggaaggcggagctgaaagcccaactgcaggccgcaacgcaagaaaatgcacagtctcagagattgaaaaagaaacctgtgcctggatcaagacggtacattctacacgtggacttcgactcattctttgcagctgtctcagttctaaatcatcccgagctccggggaaagcctgttgctatcgcccatggctctggatcaggctccgagattgctagttgtaattatcctgcacgtgctcgcggcgtcaagaatgggatgtggatgaaagctgctttgcaatcatgccccgatctcaaagtcctaccttatgatttccctgcctatgaagaggcgagtcgcaagttctacacctcgatacttgccatcgatggtatcgtgcaaagtgtcagtatcgacgaggctttgatcgatgtcacaaatttatgcgtggaagcaggcggctcagacggaaaggctatatcagaaggatcaacctatcgcgagcaagccaaagcggatgaaattgcgcaaaatttacgcgattcaatcagagagaagaccggatgtgaagtctctgtcggaattggcaacaatattcttctcgcaaaagtgtctcttagaaaggccaagcctgctggacagttccaattaaagccagatgctgttttggacttcattggagatctcactgttcgtgatcttcccggagtgggtaatagcatggcaattaaactggaagaactgaacgtcaagtttgtcaaagacatccgagatctcccgagagagagactaatatctggtctgggacccaaaactggaatgaaattgtgggaatacgcccgaggaatcgacagaacagaagttggcgatcaaaccacgaggaaatctgtttcggccgaggtcaactgggggattcgatttgtcaatcaggaccaagcagaggactttgtgcgttctctgtgcgaggagctgaatcgaagattgacggaaaatctagtgaaggggaaacagctcactttaaaggtcatgcgtcgatcgctagacgctccactagaacccgtcaagcatctcggccatggaaagtgtgatacattcaacaagagcgtcgctcttggtgtcgcgaccaatgttccagaagtcattgggaaagaagcaatatcgatgttgagaagtttcaatttttcacctggagacttgagaggtctgggtgtgcaaatgaccaaacttgaatcaatcaaatctggcccttcaggccccgagagcagccagcgacaactcaacttccagaagtctccgcctcgccagaaagtcattccagatgcggaccctgacgagctagagagtccgcaaaaagataactctgttcgtattcaatcagatccaatactcagcgatagtgcccacaagccactcaatatctcggggacccaatttattatgcccacccaaacggatcccaaagtcgttgccgagttgcctagggatatcagatcaaggcttgttgcacaagcaaagccgcgccagggttctcgctcagggtctccatgtcctcttccccgtgaagcacgacaacctgcccaagcagacctcccccctcagtctcagctggacccagatgcattggcggcattgcctgaagatgtccgccaagaagtattgggttattataaccacccagctatcaacgctgcgtcaccgctcgtgccggtagtaccagagtcgcgcccatcaacatctggttctctcaagtcgagaaggccagtctcaccacccaagaaaagacgtggccgcccgccgaagtcggcaacgattgcgaacaagcctaagcctaagcctctaaaccaatttagctttgggttcgttcttccacgcccagcagctgtatctgctagtctggacgaagaggctttgtctagacaagcgtcaccaaatgttgaagagccaacccaaccttcggctgaattccttgctgctttacctgaagatatcagacaagagcttcttgaagaacaagaacgcacccgcatgcaacagcgctcgcgagctactgaaaccacacaaagacctccatctagggatcaggaggctcctccttctgcgccaattgccgtagagaaacttctacctttaccacctctccccaagcgtcccgtctttacatcacaacgtctgtcccaattaccagatctacgagatgctgttggctcatggcatgaagtctttgcagctggcggtccgtacagcgaagacgttacttcactatgtacatacctgtccagcgtgacattgcaagagaaagatgtggataaggctgtttcagtggtgcgctggttgatgtggttggtcggtgagcattcgcagcagcaggggcctaaagagccacaggggtctcggcccgagggaactataagctgggaagaggctatagagaccatgcagaatagtgtccaggtggctctggaacaaagagagcttcccccggtggacttttcgtaaatgatacccaaatgtcagacaaaacatcgttgcctgtatatatctaaatgagtgcagaaaggtcaacaatatatgtaagatttgtaatatttgtacaaatacgctatatacagtacacaccaaagccgaaagatgtcacctctccggagaagggagaaaaatcgaagaaaatcgagggttgaagatgatagaagatgaggcagatcaaggtggagtcgtggtagcgtggcatgccccatacgcaggtgtattgccccacatctgtcacctccacctccgacttctaccccgtgtctttgacctttcagacaacaaacccgtcatgccgcctgtcaccgatggtcagttctccttcaatatcgacacattttatgtcaccgcgtcgggaggacagcttcaccgccgtgcagctccagctgagatcaaagctctttacgatactgcgactaccgacaagagcacaccagaccacccaggccattggtatgaagcacagctcctccactatggcctaccaccgtcaaaggtcaaggcgactgctaagatgaggctcttaaaggccgtgcaagacggcgccctgagcgttcccaaggaaagcctccaaatcgaaaagaatctgaagaaggaatggaagaagcaggattcggaggaaccagcaaagaccaacacgaagacgacaacgacgaagactgttaccaccaagactattacggtttctaagacggttgcgtccaaaaccaccgagaacaagactactgcgtccaaagccgcggccaagcctgcagccgtcaaaactgcggctcccaaggctgctacgtccaaagctgctatccccaagaaagatcccgcacccaaagccactgcggctaaaaccgctgcggccaaagctaccacgaccaaggctgctcctaaagccgcggccaaacctgctgctggcaaaactgcaactgccaagccagctacgcctaaggctgcctccaagaaggctacggcgcccaaggccgctgcccccaaagacacgacaaccaaaagtgctacctctcaatctgccccagccaagagaaagagggcctcgaatgccgaggagacagccgacaaaccacagaccgccaaacgccgcgtgtatggcaaaaagacccaagacaacacaaatatgcccacaaacagctaccccgggccgagtggatggtctgagcagcctgagcatcaggatgcgcctccctcgtacgaaatcgcctgcagaatggtaaatatattctccctcattcacaaacgcaatggatacttacctaacatgtctaattaggacggagaacatcactatgatgctttagatgaccagatggacattgacggtccgaacgagtttggttatggccattatagcgagtctgaaacatgctcagagccaccatctccacctcgagccctgaaaaacaccctgggtcttctcaatggaacgtacgaagttagttccccccatatcgagtgcgagtggccggacgctgttcgcggggggatcttcttatctcttcgccttaatcggaatgagatttgggggacatacgagctcggggcgtttaagggtgtactgtggatgccacaacgacccatgaggccctcctttgacagaattccgtttaagtggcgtgggcgggagaccggtgagggtgagatgagctttgcagatgaccaggatggttggattgagtttttgggtgatggtgatattgttgggatgatcagctgctatggtgatgtccatttccgagggcagcggattgatagttctgtccgcacagccagtgatctgcggaacgaatggaatcgctacaacgaagaggaatatgaccgagagtgcaggagtcgatggtgaatgatcctgaactgaatgaaggcatggggtccagcgaaaaccagtgctagctaatggatatcttgattaaatgatgcccaagtggtctatttgaccctagttcaaggtagtaagtcaaaatcctccctggatggccgagtgggtgagagacacgaagtcatctgattgctgggtgaaacattgatcacgggtgataccgcattgggaaacccagcaatggggaaactggtcagggtttcgatcctcgccaggagtagttggggcacggatttccttttttgttccttctccatgtcagcccttcactcttccttccacttatctcgtgatacagcggtgaaatagctctttctaacaggatattctgatatcatggaatgatcattgccttttgtttgtgttcaattgggcccgtctcagggaagtcacgatgttctcatgcacttggcactgggggttacaatcaacccactctgtcggtaccaatgtcttttgctatataaattgatgagcattatattcccaccaccgactaatgttttatatacagacccacacccaaatctagaccatttgcgagcctatcagcgaaagaattcgacagtctagcttgcgacagaacacttattccagagcatctacgcccgcagcctttaggcccaggcaccgacgatgctcatgcaaaaagcacccgaaaaaaccaggatgcaggcataaacccttctcttcccacggagaatacgccagctctcatcactgagaaagtcttccgacatcaactccaccagcgaggcaaaaatcaaaagtccagctgacatggcattcataacaccgacaacgagcaaaccaacctccgagtcgggattataaagtgtatgggttgcgaggccaatagcttgcccgattggagtcctagtattttgtcagcaccattgggcccagagtgagtggggattaactcacgtgcatccgtacgcaagggacatgatccagggctggagttgcttttctgaccagggaagtgaggcaatgcgggatccaagcgccaggccttcaaatgtttctgtggttgatttagtcaaattcattgccccgatcaagcaggcgaatacagagaactcacgatgaaatacaattgcaatgagcagaatcacaaattcactgccaaccgacacactgagtgacatgccgataaacacgctgtggaaaagaatacccatttcaagaaggtagacctgcatggtctctttcttctgcttctgctccggggttaaggcgaaggtatcgtcgtgacgctccacgtctgtctggatagccccgttatctttctcgtggtgagttggaacatcaggcgcagatgaaactcgaactatatcttcagtcccttcgcccattctattgatcgctcggcttatgctcgcggaccttccaattagcggacccatatctcgcaaatgccggccttccattccaacggagtgcgagcgcggcactatagagtggtcgagatactcaggaacaccgagagttggaattggaggtgtccttgcatccgaagggcagggagctggcctttcggctgggacctggtttcctccacggcagatactctgggctggactgaataccatttcgatgactgtaacgagaaatatgccacccaaggcaatggcacccggcatggctgggtagtcctttgtccagaaattagagagacatgggtcgcccagcgaagtaaatgccgtcggaaggagatgtacaaatgccgtggcgacgaggacacccgttccaaaatgggtgacgaagaaaaggaacgcaggtggaatatgcattcgtggaaagcgagttgcaaggatagggaatgcacatgcaatgcttgaggtggccaggatgatgaagagggctgcaacgtgcaaaggtaggtcgtatgcaccgccgtcacctccctgagcacaacttgatcgtttggctggctctgtaaacggcattgcaacaggtgcttccagtgtgagagcttgctttggcgttaagtaccgtctcagattatcgaaggagatgactgccgagacaagaagcacggagaggagccacaacgcccaatccttgatactctgatatgatgggaaaacattggtatttgaatccaatccattgtgattgatttcgatattagtatttttgggagcgaggcgtcctgttcactggttagaaggttattactcaaaaaaacatgcttgcttttcatacctgacattgtcagggacgcctcgcaccccgcgccaaggtgattgcctgcatccttttcctccagcgtaggaattaccttgcaattggagcttccccgtaaagtacccggaccagactcatcgtctttcttctcgcgggtgtttgagatgccatcgaggtcttggcgggtagtcaggtcgggagaaaggaagcgcgggctctggttccacccatcgtgcagcaaagtgtcgtcagtccgagatgggcagttcatggtgctatttgaatgatttttctaacttcgctatctggattcagtgtaacaggtgaaaattatagccagcactgatcccgagggcttggcatggggtggactccgtcccgacttttcttggcagtcggctatgaaatcattgcggctcaggcaacctccggtattggccgaactacgattaccggagacaatatgtttgcgttgcaaggcctgaaaactccatgacgtgaaaccgaggtcactagaatgtgtcccagaacgataggtctagcgaggttccaagtttgatccaagactactaatcgactggcaggacctctagagaaacagccctggagggtcaatgtagggttgataggtgcctgcaaattgatacaggaactagttattacaggagcacaacagtgcacattgatattcgtgttctttttcttatggtcattttgcccagggagccttggtatgcacattggcacttccatcctgtgaagccgggggccgagactgagcagaaaagggtgctctgacgggtgacatgggacctggaggcatccttgaagtatctggaagagcagagggaactctggtcgtaccactgggaattccctctcttctcatcccagcccacggggctgctgtcgagcccatcgggggaacagcttgcgtgcctgtcccggacttagcccagggagcctgggtgccagctccgggcatagaacgggtagcggcaacagacgggtggccagaatccggcgcaatggggcgtgactgaggaccagatgtggcatgaaccgtggaggggggcacaggcgcatttggatcatggtcccaactgaacagagatccgaaagggaagtgctgtaccacggggaattttgaaagaacttccgcattgtacatcttgatcattccctggtgcaacatgtcagcgtgaacatccccactgcttaaagattgcgaaccttattgatctttccccagccagctcgaatgccagaaatatcgaataacatggggctgtgctcccagaatgggcctctcttcacatcataaataaatccaatagcggagaaatatagattactttggcgttctctttcaacaatctttgcattggctaccccggctgggtcaggtgcattaagtagtgagccttcttcaggagttaggtcagtatcgttgattgcaggcgataattgtgcggatccaaagatataagggacaaaggaatgatcatcaagaccccagacgccgtgggagccagcaggctctaggttgtatgtcttgataagtagtctgataagctctaggtatctatatgacgacagtcagtaggggacgaagcatatctgacgtgttagattctgggtagacgcacggatggatcactccaaccacgatagctcgttcctccacacctggatcggccttgggaaatccattcagcttccatattccacctaggaaagctaggaagctgagttcatgaccggtaccatagtccaaccgctggccacttccccagctacccaagaaatatgatttcaactcggtctccgccgttgcgctctcacccgatgatcccctatccaagaggtcggcgggtaggcattccctcagcaggtcggatgcgcgactttcgaccacctcagaccatctccggaagcttatatttccaaacctccgcggaccagtatctggtgggacctcctgtatgatatcttctagtttcaagagaagtccctgcaattgtcggaccggagcggagtattgtatcgcatcgctattgagagtccaagtttgtatagtgtcatcggcaagcttcagtggaaacatagatcggttgagttgtagtatccacgtcataatatcagtataggctttggatgtcaggaaagccgatacatcttgcgagtcgtgaatttttttgttcggttcgataaatacgtgctctgcagagtccaaagtggccaaaacacgaatagcctgggcgtaagccatgtttgctgagaaaatccgaggtcggagtgggatgaggaaagaaagttggaggggaagcgggatgttatttgcggctccaccagagctcttccctcaccgcgtgttgtcattcttttgaattccccacgcgtttttgaagatggcgccaaaaagatccacacatcggcatcgatctaccgattatactcttggactcttgaataatatcaatgtcctccggcgcaattccacggatatacaggaccctaaaaggcgccgccgcaccaccgacacggatgtctatgatgttcctctctccccttctccgacaagaactcgaaagacccctcaaactgaaccgaaaaataccaaccggttgagtctgagaacccgtaaagtgcctaggccatcaccaccggtttcaccccccagcgtttctgaaaacaacgaagacaaagggcccagcaacgacgaatccgggtcaggcgatgacgagtccaaatcaattcaaaatggatccggcagcagtttaaaggaggaactggatgataaccgcgacgagcttcagcctgaggttgaacatgatccgttacccgaaccagtcgatctgttcccagccgaagacgaggatcgagctgatggtcaggttggttacgaagctagaagtgcacaacaagatgtatccggggatggatctggatctgaaggagaagaagagaaggacaaccagcctaaagagaaatctagagatgcacaagacaatccatctgaggacgaatccgaagatgaagatgatgaggagacggatgctcatgctggggaggaagtcatagacgcagaagacaatctatctgaaaaggacccggaatatgaagaagaagatgatgaggaagaagaagaagaagaagaagaagaggcagatgataattctcccgccgaagtccagaatcattcaataccgacccagcatattgcaaatgcagacacacccgacgtgcaaatccccgaaagtataccaagaaaccaaggagatggcgcacatgtaagtcgcatgtcaaaaaatactcaaggattccagaatgcctcgtcacagcttttggaagtaccagaatcaccaacaatcgagccatcgcgcccaaatcaggaccatcgcagcgctcgctccgatatcttcacgtggctgaccgagaccacgaaagaatctggtttcaaggagacctgggacgaacttcgcaagataagaaaaattcttaaggcccaagctgctcccgctacaaaagagcatttcatgggcatcgtaaagctcattcagcggctacgaggtgtgtttgcaacaatgatcaatgatcctgcttcagcttcttccttgagaaaccagtgcaggctcatcgccaacagcatcttcaaagagaatcagtggatcatttacaccgaagccccagagaatgaagatgatggtgcccaactggtcaatcagctcgaagcccatattgttccccgactgattgacctggtcatacttggattcaagacctacaggacattacatgatcgggtggcgccacatttccgcattatcctggatttgctttggggttcctgtgataggatatcttctctcgtcgaggtgaattatgatattagtgcgggcgtggtggctcattctaaaagagcgatgcgacacgtgaaggctctaaaggatgcactgaaagatggccgactacgtgagacacctcatcgcatgccccaacgccatctaccatatcggccctttgagttggaagaggtcgatagccatatctcctgtggacggtggatccatgtagagacgaatgcactccgtgatggtttacaattatatgagggtaagactttccatttctcatgccatatgctattctgatggtgtcaacaggggaagatcgatatattgatatgaagtgtgacaacgcaatcggcggtcaactatccgagcgcatcctgcaacatatccatggccaagccgtcaaactcgggttggatgatccatgacctaattgagtattgggagagactagatcgggggtgatattagcggcattgtatagtaggctcgatttcaatacccttttgcgagactggagttcatagagaccaaaagtgtcgatgtatatatttggccgaggtattcatgtggggtcggcccgcgaaccacaaaccgcgaaccacaggcattgtcttgaacatccatggatgtcaaatatcatgtccacattgaatacagtatacccggaagctttattatccttcctacgagcgacaatatagatatttcggtaaaatttgcggataggtttaatatttgtgagctactcagggctggttttgcatcaggaggaatttcgtccttgggctcctgatcctgtgtcttagacatcttgggtacctacatgtacatagcctggtactttaaggagacttctaggacttagggagctattataatgcgtacatatgtaggtgcaaggctccaaagctacaagacaaatactatagagcaaaaatgaacacaattagtctgatcttggacccggtcaaagccagcctatattaactgtattctgatcatctagataaagacagagacaatatcagcagatcccccggatgcacgacccatgtagggggtctataaagaaaggctccaaagtatagagcagcggcgatccccccctcctaaattgacaccgctttctctttttcccgctttccccttttctcccccaaagcatcctgacaacatttgcttttgtcggtttaatttcctctttttttaaaaaaacaactgtgctggacttctctgggtctggagatcagtcttcaagtaattgtgaagatttccctttggaacggttgtgcggcgcgtgagtacattcttctcttttctgcatgtttgtttatagacgggagcttcggtcgagctggacaatgacccagttctgccatgggcatagctggaataccttgaacgactggggcaaaaagatttcatgcttatgcccagcgcgctataagcccctgacctggccattacagttgcatcgattcgagcgcttgaatctggggttgcgactccgagcataccagctggataattatgcgtttaggggtataacagctgacaacgcttttcgcagacagcttactggtacatgccaactgaaccttaccacgaagcttgccccctttaatacattaatcttgaacaatccaccgatatgtcgtcaaacgaaccggtcgtcgcccctgctcctgtggaggtcgatgagaatgagcccccagccaccccgatagattcgagcatcgtctctgaaagcgacgagttgcttaagcccagccccgaagtatccaaggaaagccgtgcgatctctccggccaaggctagccctgatacaccgagcaccgagaagcgtcctgtgtctggcgcatccaccaccaaacggcccacctcatcctccgcctcgaaacctacgacgggtaccacccgaccgacctccggcactctgaacaaacctcccactcgtcccccggccacgacaaccacccggaagcaactgagcacctcgactgtctcgtcccaccggtctcacaagtcagtcagcagctctgcagatgagaagcctcggtctgtggcgagctcaggagatgagaggcgcggaatctctggatctgcgaagcgcatgtctatggccggtacagcctcgacccgcgctcctctcaaacccacctcgtctttcgatcgtagatcgagcgttgcaggccccactgccgagaggaagcccgccaccacaagtgcgcgcaccgcgaccgcgacctctacaagcaagcccgtgggcaggctgacttcgacgacgacacctgcaagccggactgctacttctacctccaccgctagacctgctactgttcggccaccctcgactacgagcaccgctaggcctgtcactgccaccgactccaagaagcgattgagtacgcttcctgggtcaattggccgtgctggtgattctgagaagctgcaggccctccagactaagctcgccgagagcgaggagaccgtcgctagtctgaagtctgaattggagactgtcaatgagaagctcagccagctttctgtctcggcccaagaacccctgggtgatactggtgccaccgaggccattcgcgcggatcacgccgcagagattgagaaattgacatcagcccatgccgacgagctccaggccctgcaagcgcgactagacgaagccgagtcccaacggaaagaactggagaagagctcgcaaaaggagttggaggaagccagacaatccgccgcggcgcaaggggatgacaggacagttgccctgcttgacgagctcaaggcaacacatcaaacccagcttgaggccatcgaaaaagagctggcagagcacaagtctgcagctactcacttcgaggagcagatcggtgctctgaagaaggaactcgagtttcaaaagcttgctctggaagaagaaaaagctctagagctcgaaaacttcaaccgagaactcaagggccgtgatcaggtgttagaaaatcttaacacggagattgctaagctgactacactcaaggagcaagaggtccgtgctgcggaagagtctgctaaggagagtgtttctggtcttcaagagcaagtagccgcactcgaggcgaagcttgctgcggctgagtctgctacacaggaaagctccgaggagaaccctttgatcgccgagaaggatcaagaaatcaccgagcttaagcaggcccttgagaaaattcaaagtgagctccaggaggcacgtgacgccgcggccactgaattgtcatcgaaggttgtggagttagagactgcccatgaggctgctatcgcaagcctcaaggccgaacatgaaagtgctatcagtgagatttcggcttcccacgcggaaaaactcactagtgccatagcggcggcggaatcgagcggggcagaacacaccacgcaaatccaggaactccgtgatgccctcgaggcgtccaaggccactgcccagaaaggacaagaagatgccgttgctgaactgaaggccgcacatgatgcagagctcaaatcactacaagaacagctggaggcttccgagaatgccctcggcgagtcccgccgtgcactggatgagggtaacgcctctgcacaagaagatgccgttgctgaaatgaaggccgcacatgatgcagaactcaaatcgctacaggaacagctggaggcttccgagaatgccctcagtgagtcccgccgtgcactgaatgagggtaatgcctccgcacaagatgttgccatccaagagattgacgctcttcgacaaaagtgtgagtcgctggaatcacaactgaccactggcactgggaaaatcaatgcgctgctcgaagaaatgcagctcaagcaagctgaagtcgaaaagatctcccgcactctacgggataatgaagatcactccaagcaagaaggtttacagaaggacaataagatgaaggctctggagcagaaggctgcagaagctgttgtgcttctcgaacaacacaccttgcaggctgcggatgtggctgagaagcacgcaaaggccctcgaagagttgaaagctgaacatgctgctcagcttgcatccgaattagagcgggtcaaggaggcatcgggatctaatgaaagcgctctgagtgatcttcagatgaagcacacaaaggctctggaagaattgaaggctgaacatgctgctcagcttgcatccgaattagagcgggtcaaggaggcatcgggatccaatgaaagcgctctgagtgatcttcagacgaagcacgatgagttgcttgccacaaacaaggaattagagtctacccacgctacccggattcagtcgcttgaagctgatttgagggcggtgatcgaaaaccacgctcttgagattgctacccacaccgagggtcgcgaaaaggagaccgccgaactccaaaatcaattcgaagaaacccaggcgaagttgcaagccgagatttccgctttgcagagttccagcaaagctgatgccgagcttcacaagcagcaaatcgccgaactgcaaaaaggctttgaagaggccaaaacccagctgcgggctgagatcgaggctgcccaaacctccaaggctgctgaaatcgatgctgagcacaacaaggcaattgccgaactgctgcagggatttgaaaagaccaaagctcagctgcaggttgagattgaggctgccaaggcctccagggccactgacctcgatgctgagcacaacaaggccattgccgaactgctggagggcttcgaacagaccaaagccaagctgcaggttgagattgaggctgttcatacctccaaggctgctgaaatcgatgccgagcacggaaaggcgatcgagcagcttctaactatgagcgaggctaagctgtctggcctcagggaggagttcgaggcttctaataataccaagattgccgatctccagaaggcccacgatgcagcactagccagtgtcaacgagcagttgtctcaggccaaggccgctgcccaagacacctccgttctggatgacttaaaggccacagtcgccgatctgcaggccaagcttgctgattctgagaaggctcgccttgcggtacaggaatctgccaccacttcttccaaggaaattgagggttactcagctgagctcgccaagatccaggccgaccatgctgcacttggagagaaataccaagccgcggtcgcccaggtgggtgaactcgagagacttgccaaggactcagacagccagaagtcgcaccttgagtcgattatgaagcagctctctgaatcccgcgaccagctcctcaaggccaaggccgataacgccgccatctccgactcgctcgttgattgcaggaaccaaaacaagaccttgtccgagaagcttgaagctggcgaacgtgacctgaacgatcagatcgacaagaacatgggtctcctcaaccagcttggcgacgttgattccgctatctctgccagccgccgacgggtccgcgaactcgaaaccgagctcgcagttctgaaggcggacagtggcgagaagagcagctcttcgggcttggacgctagccggtgggcgacagctgatgagggtagcgacaacgctgaagatgggggtccagccacaacggaaggtgaggacctaggcccatccattgagggaacggtgggagatccccgattgaagaagtcttcctactcatcagatcttcccgcattccacccattcacatgattatgaagactattcagcgtatacagaggactaatacattccatagatggccagcctgcaagaacagcttaggcacatccgaacagccagtgaggattggtacagcgagcaccacaggtcagtcaaatatgcgctcgtattgaaaatcatgctgatccctccagactcattgccgaacttgctcaactccgccggcaagcatcctccgactctcccagcccttcgaccacacccaattccgaagtcccaccagcccccgagccagaaccttctcgcacccgcgccgcaacagtctcatttttcgggagacgctaagtttcgcgtggatatggcacctttctgagctcttagtcgtgatgcagcacgacttaatcttgaatcctgtttcactctgctcttgtgattctactgtatgtaataactacgcaggataccctgtcttactatgtcggggtttcccactattcttgtttcaatatctttatcttacacatacaacttgtttgagttgaactttgtgtcatccgtcttgcgttactgcaatggtcagattggtacttactagcgagagatgcgtaagtggttcgatgcttggtccaagaatgcaggaatggataattcaagcgcaatgatcgaaagtctagaacaaagtgggtatctcaatataaaacaataaagttcaaagaacgcctttccccatgccccgaaatagtgcgcaaaggtgaattcaaaatcactccgagtcggaagggtagctgaccagcgctgatgtcggcgccacggcagaggaattgacttctgtgccactgtggtcttcacggagggatggagtcgaagaggtggcaactttcctcttcttgatgctaggctgccatgcattctgattatctgcatcattcaccaagaacggatcaatcatagcacgagtattcccaaccagctcacggtgtagagaagctttccgcgtcgcaaccaagtcatccttcttaagtcgcttcgaagaacgagatttcttctcttccggccgcgtctttggtgcaggcttttccgcccgctgctcaaacataggctgaagacgagtcatacgggcagcacgcacagccgggtcctcgccaaactccaccatgctcgctctctgccgatccccctcagtctcatccaaaagctcaatcccaagactcattttatccttgagggcctccgtcttcgccttagtcttctcaagccccttcctttgctgccgaaacgtcctccgcaaccgcatcgacttctcatacggatcctcccaatcgcgattctgccgttcctgaagctcaagaatacgagtcgcctccgtccgcgcacgaatcttatcctcaaccttaccctcaatcttcgaaaaaggatccttctccgagggatccatctctcgcgcgtacggcttgatagcaatctccccaggctgcagctccttatcctcgccagtatcacgtttccgcccaccttcggtaacgacatacgctgtgttctggggatcggtcttgatctcgatggtcccgccacatacggtgtgtttcatgcgaaagctgtatatcggcgtcgagtagtagttgcctacttttttcttctctgcgttgaagcgcacgccctggccgattattacggggtgcggtttgcacgttgtgcaccatactgcgaagggcatctcgaagcgcacgattagcgcgcctgttgcgtgcaggtggcgggcgcgcgcgccgagggcgtgcttccccnnnnnnnnnnnnnnnnnnnnnnnnnnnnnnnnnnnnnnnnnnnnnnnnnnnnnnnnnnnnnnnnnnnnnnnnnnnnnnnnnnnnnnnnnnnnnnnnnnnnnnnnnnnnnnnnnnnnnnnnnnnnnnnnnnnnnnnnnnnnnnnnnnnnnnnnnnnnnnnnnnnnnnnnnnnnnnnnnnnnnnnnnnnnnnnnnnnnnnnnnnnnnnnnnnnnnnnnnnnnnnnnnnnnnnnnnnnnnnnnnnnnnnnnnnnnnnnnnnnnnnnnngattagcccgcgtgttgggggcggggggggggcgcgcgcgccgagtgcgtgcttccccgcgagtttgtttccggttgttaggccttcttggtctggggggacatagctggtggaaatgtgagctgggggttatgtggatttggatgttttgctgaccgtcccatatctattgaggtggcatgttagttggttgtttcgtatgttctttggggtgggattaggacttactgaagccttgcatcttgggcgagttgggtaggtgttgccgtcggtgtaattgaagcttagagagtgtacaggttactggccgcgcgaagacagccagtccgagttgatagtgttgtagaagcgaagttgtcggcggaactgactttagtcggagatagcgggattaagacgggtgcggatgactcatcatttatttttgcatgtatacttgaagaagacatcaccagaaacaaaaaaaaccgaccattcaacaaagtagatcaaagaaagatttatcaggctaatcaaccataacgcttgatataatggtacactgaaatataccgacatacatcgacctcattcttacagcatgaacccatacttcgtcatacattcttatgaataactttttcgttacccaattttgctaaactatttagatagggtttctgggctgattcaagaatcagatttgcatttccttctctattcctcccttcttgcgaggcctccgtttttagtaacatccatcgcatccagtcgcccgaagccttctcggaaaatggaccaaggcacgcgcaaagagacagagcggctgatcttggagctgctattggaagacgtgaacagcaatatccataggctcggagaacagccattgccgaaggatacaactcacccgacctacagactagaagaactagagcctgacaggagggtggcacttcatatatggaaatccgaaatcgaaagacaaagggtcacattgagatattctcagatggctaaagctctatccccaggaagggaggtgaaggagacacaatttcccaagggaacgaagacattttccaaacatacctccaccgctattcagaagctggttcgctttttcaagaacctcatgcgatctatcaaagccctgattcccgcccacttctcactgccccaggtctgcagctcctgtagagaagtccacagcgaaatcttcaaaacacaatgctcccacttctattgcaagaattgcttgatccgcatggtcacaaaatctttagtagttgaatccttgttctctctacaatgctgccacaagaaaatcgaaggctcggaaatgaagaagatgatagggtccgcattggcccaagaacaaaggaagaggcaaaccgagctcagcgatccagaccgaacctattgttcggattgcacatgctctcgatatatctcgccagcgaataaatcttggccagatttgatctttaaaccggctttaacctgcaagtgtggtgtacgcacgtgcagggtatgcaagaagagtgctcacgagggcaagtgtctacctcagctagactggttgatggagaaattgatgaacaagaagatttggaagcgatgtactaaatgcagccgtgtgattgagcttaaagagggctgtcctcatatcatgtaagtggttctttggccctttatcgaccctctaagctattacggggacttttaatgacacctgacagttgtatttgcagagcccaatggtgctaccactgcgggaagaaatggaaaacttgcgactgtccgaaatagggatgggaatcaattcaaaaaattgatttttatcactccaaccgatttatcaagaccaaccatgtggataatacactggttattctgactgaacttggcccggagagtaaaatatatgacctgagtacgcttggcttggaggatcctgatgatatatgaaattgctcaactacttatatgtgagtaatgtggtgttgccttctttcgctcaaggtaagccaattgatacttccatattgctatacaagcgaaaatcgagacacgtacataatttcagagtcatgcgtagtatatccatattaggcactgtataagctccgatagttccttggaagctagattttagatactaaaagagcgtattatttgtgctgtatggaggccttgcttttcgggcattcgcatgggtatacgtagtatcaacctcaccaccaactctcttttgccaaaagagggttatttattttcataacacatctcttactctagaccccttcatcacgtgggctacgatacggatcaggatacgcagtctctaagtcttacagctattattggtggacagaacgaggagacgaacgaactaaagaaataataaacaagatagggagtcacgttcatgagatcccgaaagaatatgggcacggccatttcaatgggactagggttagagacagaagatcacttggccaagtataagaagaaaagaccctcttccaattcattctctgtcgagattcggcaaactggcgattccattgaaaatgccatcagcttgaccgacacccccaaagttgagatttggcgtgaatgtgtctcctgccgggacgatcatctccaagacaaaatgctcaagacaaaatgctcgcacttctattgcaagggttgcttggttcgcctgttcaaaaatgctttgcgtgatgaatccttattccctcctcgatgctgccgcaatccaattacggcctcgaagacgattctcggatccgcattggttcaacagcacaaagacaaggtgattgagctcaatgaccccgacaggacatattgttctgatttgaagtgcgcccgatacctcccacgaaatggcacgcgagctaaggtttgcaaatgcgcgagctgtggagtacgcacatgcaggaaatgcaaaaaaagcgcccacgatggaccctgtctatacaagcttgatgcgcttttggaggaattggcggattgcaagcaatggcaacgatgctccaaatgcagccgtctggtcgagctcagaacaggctgtaatcacatcacgtaagggcgatttcatttatcattgattactctcttcgctgtcttccactgtgggagcgtttggactcacatctactaggtgcttttgcaagttcgaattctgttatctttgcgggaaaaggtggaaaacgtgtccctgtatcttcgcagacgaagataatctttacgaatgagattgaactagccgagtcaagggagtgctctaggtttgccttggggcgaacaggataaggtacacaaatgatctgggagatcgacattacccagccctagcgtcaatcgatctcatttattttcaaggattagcctaaattgagcattaagtagctatcttgtcgacaatgaggcatttactgacctgtggtttctaaacatggagaaaaaagacacatatgttagccatcataattgcatagtcttctcagttatatagacttttctgtaaatacgatacaaagtactataataaggagcatgtaagttctttatacccctcattatgacttcacttaaaaaggaatatttggtaaacacggtcaaagttctcgatgttctaagactattccacctcgttttgcaagggaatccacaattttgtcataaatcaactcaatcactctgatttggactcagatcacagtgactaccaaccgagctatgacacagttaggagaactcatgagtaagattcggggacgcatcttcacgaggggtgcagccctgtcactggataaagagcttgaacaaaaagcctcgtcaaatcctaaaatgcaagggaagatgtctgcggtgccaggtgagtatgttatctcggatgatagcgatgaagacttgcttgatgaaggcttggatgatcagtatgagtgtacatgttgtacggaaaagtatccgcagtcggatattattcaaaccgaatgtgctcacacttattgtcgggaatgtattgtgcgcctttttgagaatgcccttgcaaacgaagcctcatttcctcctcgatgctgccgcctgccaattgctgtctctatcaccgtcgaggatatgataggcattgagattatgaagagatacaaggaaagaaacaccgaggtcaacgactgtcatagaacttattgttcaacctcaccctgctatcgctatatcccgccacagaacatccgccgtggggtgggaatctgccagtcctgtgccgctcgaacgtgcgccgattgcaaaaggcagggacatagaggtaattgcaaccatcagaacaccgagaagtgtaagcgtgcttctaaggcaaagaatcgtaagcgtgtttctaaggtcaagaagcgcaagagagcttctaatgccaaggagcggaagagtgcttctaatgagaaggctaagcaagcttatgatgacgagatgaatgataatttgctggaacgcctggcaaataggaagaagtggaagcgatgttcaaattgctctagaatgatagagcatatcgatggctgcatgcacatatcgtaggccgaatgctgctcccgtgaatctcagaacccttgaaaactgaccacgtcgtctagctgcctatgtggatgggaattctgttatgtgtgtggcgaaaagtggcggaactcccgtcattggtgaatgttcttctcgtactcaatcaagactttacccaagactatgctacgctcagagagtggtctcacctaattaggccaggtatttttttggcactcaatttcaatacgtgtgagtgacatataccatagtccaggcctcgaaaatggtagctcaatacactaaagatcaagaaatctatcactattcatgaggcctgtacaatccatccatagtacatatggatgggcttgtagtaatgccaggctactattatacataagaaatagcatacttaacctctgcaattcatcaatggtatagcgtatgaaccagctaccataacgcgaaagtttatccagtagtgcctgtattgcagtacgcgaaccaagcctctcttcctgccagcgccgcttcaaattatccacgtctctttttgttatacaactcccctgatttataggatcggtaggattggtggctgttgtacgacgaaaatcgaggataaaacgatttggaaagaatcttttcgcggctggagcaccgaacagagtatccgtgccccagctttaaacatactaaatctccggacactttatatcgaacgttggcatgcacccatccacctatttccttaccattaggactatcttactggtcggattccggttcattttaatacctcccctctgctgcacgatataactgaccgctgcttgtgtacatctagaagcttttcccaaggttgttgaatcttcgagttcaaaacccttggagtggcctgtactattctaaactaaagtagctcaacatagtataggtctctactattcctccaccccttagcccacgtgacttctgtaatccagtttcaatgtcagctccgaagtcacaaaaaagtgcagatgatagtcatgccaccttcccttttggcacacgtattgaaagtggagtgccatgattgacctctcgtggcagacagctcgatctcaacttatttgctttgatattttgtattgacttggcgtgtgtcggatgagctccatggcagctttgatagccataatcacagtcaattaaacagaagataaagtcaccttggtctaactacctgggtccaaaacgtattgctgctccgacgtccaaattaaagttccttttggatcattgttcttccgccccagatcaatccgtggatcagtctacgcggaagcttcgaatcaacagtggcctgcctgtcttccaatcgacatcatgttgcccaaattcttgcaaagcagctacattcgctataaggatgataccaacagctttgcaacctggctccttaaggcagccggcaaatgtggctaccaaccccagggcctcgcttctgccgcgcccacctccaaaaatggcaaaagcaagagcagaaataaggcggcaaatgactcagatccagtccagtacaccatgactgttaaggatcttcaattgctggctgatgttgtggccaagtctgctctcactgtgcctacacaagttctcatcatcgtcaaaagagcgatcaaattgaggaaacatgtcacgtcttggtttttggggcaaggcgactctgacaataacaagcgacacactcattttatctccgcactggaaaaggtctgtgagaccctggaatggaagatgaacaactcttccaatccggatagtaatcaacctcctccaacctccgaatccggaggtggcgatgccgaccttgacatgttcctcaacaaatttgctgtacttaccgtcgaggagccacaagagactcaagagggacagcagaaatcccccgaatcgaaacaggttgtgaaggtggagattgttgagaatgacgaggatgaggacacgagttatttccgcctcatattcttcaaaacatactgcatgttccaagatttgaacaacatgcgggcgtttatctctcatacctggtcagagtaccgagataacaagatcgatcttatgaacgctgctatcgtgactgacagtgcgttgcaacttgcccgagatcttgtgcaggaggtggtggatgactggagcacatccaccccctctatcgataacctccaggaaatggtcttcaatgtcgcttgttttactcggggcatcgatgcgaccccatctattgaaatcggcctaccatataataaacacatgtccgatgtagccgagtggtgctatttgccaacacggatcttactggaatcattccgagacgttctgcaggataatcatcttccggtcttcaagaaaggctttttcggcacttacgatcccaaggctaacagagaggggatgtctgtgggccagaaattcaacgaagacaaaatcatttttgtccaactaatgccagagttctgcatgatcgataagtttggtattcgtatgcttacctccgatgcgattactgcaggtcttgttgagttttgcaggaccaaaaaggctaccctgtggcttagcttcgctgcacaggtgctccttgacgttcatcacatcatgcgttacagcactttaggtgcatttgacgaccttcggatgtctggactgcgtatcacaaaaactatcgacgactacttcaagggtaccaaatcacacccgcagccccaattctggcccaaggagggtgatgaagaaatcaaagatatacacttcactgtggcttcatggattatccaggaccccttcttagaacggaagcgtgtttcgatcccaggctatgatgcatcagaaaaacatgtgcttttctctcagcatgccatcctttgtggattgagcctgtttcatctcaacacccggatgcagtctgttggccaacagcttgtgactcaatggtatgatgtccagcaactggctttcttgtacaatctcgcaaacactgatgggcatatgaacttgatttggcctgatatggaagcgtttattaagattcacggagagtcacatatattcattggttctcgaccaaagaacgctagcgagtctttgaataggcttgaattggccacaggcatatcgtccgccgctaagtttgcccgcggttcgcgcaagagacaagacttccatcgccctgatggaaagaatcccagagtgctgacgccaacaactacgatcgcgaacttgttccgggcccagtatgtgtctggttttagggaagaagacggcattagaacaattgacaatgttctggatacgctttctcaggaaccgtgtctcagggagaccagcaaggagctccagccctccgatctgcaagtcatgttccaacagaagtggtcccatacccgaaatattggcaccctgcaacttcttactcttttgaagagcaggttgtccaaagaagagcctttgctcctattcaactacttcggcatgcacaagcgctccctggagctgctgaggctgatcagagcaaaagaacatcacaagtttgtccaatattttacgactgcgtacatgcccgatgaatctctcatctcaaacattgtgattctggtccaccatgttgcgcgaggctcggcacaaaatgcgcgtgcattgggaatgtcttccatgggcaatggcagtcagatttgcagtcgaattgtcatgagctgtggtgaagtcatgcgggattatcttcggaagaatggagatgtggcatgcaaagagctaagggttttctgcaagaacaaaaagccaatacaggatgagatcgactatgataagggcaggtccgaagagtttggctactggtttggtattgaagaggctttagacccaaaggttctcgcctcgctcatgaccgggatcccaatagcttagctgatggctctggttaagctcttcaacaatcgacgaatacaagggggattttatgtatcaattgcccttatttatgtgatattgatgcattcttatgtctgacatatactactggcaaaatatattgaatctatacgctatgtacattctcaacgaccgacgtcttctcaacattcagtcccgtcttagtctcaacatgctccttattcagcttagcttttagaataaaagccgaaaagaagacaccaacagcagacatgcacgtgtaaagaatccacatattcctcagactccaagcaaaagcctccctaacagcaagcaactgcgtgggatcagtaatgaatttaatcgactcgatactcgcagcagccgaatccccagacatctgagccgccatgctggtcgacatcccggaagccaacaagctggactgcttctggcccatactgttctggaagacgacgccgccaatcacaatggaggccgcggttgccatattgcgaatgaagccgatggttgccgtagcggttgcagtgtcctcctgtgagaccatggcctggatggcgattatgggcgtttggaagaggaatccggcaccaagaccgccgaggatctggtacccgactatctcgccgacggaggatcccaccccgaggttgatgtacagcccgttcccgatggtcattagtgccaggccgatccagattagttctaggtatcgacctgtgcggtggattattgcgccggtaaacatgccggagaatgcttccgtcaccacaagcgggagaatgaggacgccggagctcattggtgaggagccgtgcacggattgtaggtatagggggatgtagtattccccggcaatgaagacctgtaagtcgttagtggttgaaacgaccaaggggatgctatactaacaaagccatgcgcaaatgccactagcaaggtggcaatgttagagaatcgggtgaagatatccatgggcatcaagggatacttggctagtttcttctcgctgtagacaaacagcaaggaacacaaagacccaaaaacaatgagacagatcacctgcggtgatttccaggcaaacgtctcgccgccgaagtccaatcctaatagaagcatgagagtaagacccagcacagagaaactaccgaaccagtcaatggcgcggacgccatccataattttcgtctgggggttgtgcacatccaagaaaaagaaaaggagtacaaatgtcacccccgagaccgggagattgatccaataagtccatctccaagtgacatactggctgaaagcacctccaagcaacggtccaaccccaccagcaaaagcccacatgacctccatcaggccgagatataaactgcggtgtctgttacgagtcagtaaacacagagaagccaaaagcagataacccagatatcttacctgacactgaacaaatcggaaataataatcgtaaccagctggagcaaaccaccaccagcaacgccctgcagcgctcgaccagcgatcaacatctccatactagtagcagcagcgcaaacaatcgagctgaggaaaaaccacccaacagccaagagcaagataggtttccgcccccagatatcagaaagcttggcccagatacacgcgctggcggcggagctgagaaggtatgcgccgccaatccacgtatacccagcagacgagtggaagtacgcggcgattgttgggatcgccgtggccatgatcgtttgatctagcgcggcgataaacatcgatagctagtaggattagtaggtgaatatgaggatttggttcgtatcttactgaaagggctaccataatagcggcaacttggactttgcttcgccctttgggcggagcttcctggatttctattgatgctgccatttctgagagatctggagttggagatttcaatttttgaagttgaagacttgaaaatatttttcggatcggttttgtggggctcatctggtatggattcttagtcggttagtatggtagatgatactgatcttggatgagggtaagatatagcgttataggcctcgtttacatcagaaaagagtttgaatgaataaaaaagttccatttgtgaaagcgccacccacatatagtcagtatgtgctaactcaacgccaacgaagacgaaaaaaagagaccccagtaaaccagtagtaattcgaaacgaagtattagccaaccctcctaccaaccgtaactccaaagttaaccagcgccgtcgcagactcacaatgagcctcaaactcgcgaaccagcccatcaacaatcccacgtgcctgcttaagatcctcagcttgaccgataacaaccatagaaggtggcgtcagcgcacgcatcacacccgcgacccatttctgcgcgaaaggccgcatatggtctttcccagcagtagtgtaggtctcgcggacgacgtcggtgaacccatgcgcagagatctgatcatacacgcactgcggcgcaaacggccatagacctagtttcagcatggcctcgatcacgcatgaccgcagtcgggttattgctgttggttcgggtaccgcgtctgtgcagaacgctgtgtggtcgacttcttcccattggatccagccgtttggttctgcggttgttttgttagttgggagtccaagtttgagagtagtggctgttttttttttgtggcgagagtaagaggtgaggaaagacatacttagtaaagcgcgcgcgttggcgagcacacgtgcgtaatctgcttgtttcaagcctgctgtgaggagtcggatgtgtacgaggtcatatcggccgcggtgagcttctgggaacgggcgcagtgcgtcgtggacgcttagtttgattggcatctggccaggtcgttggatctcgtggccccgtgggtattgggctgaggagatgtcgaagccgtggagctcgactgacttgttcgggaggatattggcgacatcttcgagccagacgctgtagtgggttagcttgtgtgtgacagtggttttggtttcagatcctcaaatcaacatacccagtgccagtgccaatgtcggctactgccgtcaggtctcttggaatagacgggtgaatgacgttggagagctccacgagaaagcgatgctggtcattgagactatcaggtgttagcagggagatcgatagatattcccaggaaatatttgaacataccgtgtagtctcggcctcatctcgatctagcaggtagactggcgagacactccccatattgcccaagactttgaaaagcctggacaaattggagagaagtctctggaacgaggaaaacattttggccattttggtaaggtagcaaacacgaatgagtttgatgtgaatgagaaagtgactgacagagtcatcttcctcttcttatagtcttttctctgatcataaaattctctgaatattcaaatatccaaatatccaaacctcaatcacctcaatctccatatgccagcaaacaaagaaagtcatcttggatctccacataataaccacgcgctagttcacatccccgcgccacgatcgaacggattgacctatccgagactcttcttagatcttgagtattagacgttcatgcatggaatcccctattcggcttaggccgagtttcttgctggctagtgacatggatacatcaaactcagcccaatatccagacagccttaactttcctgttggagaggggcttatacgagacatctgtacatggtagaattgggaagtcggaatgcaaaagtcccggcgtcgccgtggtcgtctactccgtaaaaaagccccaaggcgttgtcttttggctttatggcgtcaaacggagtgtggaatacggactggtcatgagtctacagactatcggtctggaggaattcagatgtaatgaacgcccaaagaatgccacatccccgaaatagatacatatcaaatgtaattttagacagttattttacaaaatgagaccccaaaaaaagagagataagacaccattggctctcaagacttatccaccaaattagcaaacacataccggaaaatctcccggctcttatacaaattctccacccgcatgcgctcgttatccaagtgggcgttgtcactcgcctgcccacaaggcaagttagctgccggggccgaaaactccttttccaggaaccggatggtcggaatcgacccgccctcacggatgaacatcggtttcactttggctgcgccaggcgcaacaggcggtgttctggcaatcggatcagacttgggtcggattggcaatgcaactgactcttcactcgatgccgatgtggcttgtgtgagggtggatgacgttggcactgtggaggccgtttgcgaggaccgtttgcgcgcggcttccttgcctgctgatgaggtcgttgtcgatgtgattacccgctcaacgtgcgaggctagactgtcgtcggagtctttccggcggagttcagggattgggcccgcgctgggtttgggcttgctcgctgggtgaatgtttggagactgtgcgataggtaggtattggagtttcgggtcctcttggaccggggtccacgctgcggtgatcgcctctgacagcgtggcgaagatttcgttatctgggtctccgagccaggcgtcggatttgccagtgatttcgactgtgaggtcgttttgtgagtcgagcagtgcgaattgctcttgtgcataggcggtgaggtcggctgcgacttcgtcggcgtgctgatcaggtacgatacggatcgatagagttgccttggctcggcgcgcgatggtcgttgcgctcttgcttccaggaacttccactgagtggacggtcaaggcgggttcgcgccagcgatgcgtcaaggacttgatcagcgcctgactgtcggggatctctgggtgctgcacaagcaatacatcggaaatagcctcaaacctcttctgctcggcgtccgtgagtggcctgacagcatcgtggaagccaggcagattaattttgcctttgcgtccgacaatcgtggacaaaagcatggtaatatctttgactggttcatccagcaatgtactgccgtcgataccactgtgaaggtcagggtggtcgctagtcacgaccaaattggcgtgcacgactccgcgcagcccataagttaagcacggattgtagtcatcaagccagtaactgttcgctaggagaacccagtctacagatccgatctgagccttgtgctcgcggactgtttcgtggaaaccttgggatccggattcttcctcgccctcaatgaggaaaatgacgttgcatcgcaaggtcttcgtccgggcgagatcagccgcggcatacagtgatgccagaataggtcccttgttatcagagacaccgcggccgtacagaaacccgttaatggaagtgagctgataaggatctgtccgccacttgggtcggttcgtctccgcacccacaacgtcatagtggccatagaagaggatagtcttgtccaccttttcaggtgatgtagcgttgaatctagcataaacaatgggattggtgtcctggccggtaggcaggagcttggtcttcgcaccgaggtagttgcagtgtcgccgaaggaaagcagcaccctggttgcattcgccagcgaatttgggacttgctgagatagtcttgaaagagacgaactttgcaaggctgttgaccatttcgtctgggtaagatttagcgagcgttcgacgcgaatagactgtatgggacgtaccgttgctgatcggaggaagctcttcctgggtcgagaaaaactcagtcaaatcccagattcctactgagttgtcatttccaccagtggcgtagagctggcgatctttgaaccgtccaacagccgaggcgagcatggtgccctcgtgagcgacccagccaccgacctcttcgaaccgagagttgaatttctagcggcggtcagcggaagtcgatttgaaggcgacaaaaatagaccagtacataccttgaccgttccactagagtcaccacaaatagcgataccctggatcacgtgcacagcccacagatcaccggtatgtctagtgatccgcttaacgagctgctgagagtccaaattccaaatgttaagggcgccgcccgccaagccacagtagagtagtgatccctcaacagcaacacttaacacaggatctccattctgtagcttggcgatttgggacggagccgcgccaggatcctgacccaagcgccacaacttcaccacaccatcgcccgcaccagtcaaaagaacctcctcggaaggagcggattcaaccaggcctttgactagaagcatagagtagacgtagccatgatgcgcgaatagcttatgatgatcccgcttgaagctcaacacatgaccaccgtcggagagggcaccatccgatgatccgggagctcgagtaccatccggtcctcgggaatcaaagaagcgatgcgtccgtttggacggatgggcggacgatgcttggttcaatgttaaaccttcctcggaaagatcacaccactgtttgggtcagaatgtcgctaaatagggtacagacacgggtcaagtacctggatactggtgttctgtgcaccgcagtaaatagtttggttatcggatgaatagactactgaaaatatatcgcccacatcgtggtgtgaataaatcgagtagagacgctcaaatgttcgcgtggaccacacctatccacgtcattaatcccggccccgagattcttcaattgcatgactcacattgatcacggagtcgcccccacttgaaaatagtaagttcccatcttcggagagataaaggcctagcacactctctttgtgtgcgtggacggataccacgagatcaaaggtttccagggaccacgcctaatgaaacggttaggctcaagccttggcgtagcaaaacatagacagaaaagaatcgaaactaacgacaatatctcctccttgcaagccagcaaaaacacagtgttcatcaagagccagagcgagaacggagcgactggcgagcacgcggtgaccgatgccgcagtcactatttggcagggcactggcatcggcatgagtatgagaatcagactcccaggttttctgatcctcctcggacgtgctttctgattcgactaagtccataatcagtccaatatgctttaattgcaatggtctgcaacggtccaatggtctgtgatggtcgttgtggagagtgaagtgatgttggtgttctcgttttgtctccgctgcaaatgaaccaaacagaacactggaaatctcccttcactccattctgctttctttttggttttcgaggttgaagagcttcagtttttttggggaaatgcaggaatacaaagaaatatcaaagaaatacgaatcatcaaggcggtacggcaaaaaaaaaggaaataatagcaagaagatattgcaccatcgataaagtatttgactcaccatccctagcatccctttgattccgacaacaagtccttctatggagaaaagacatcagttgtcgaatccattcgcttgagctctatgccacggtcgcatgtccattgcgtgggtttgaatattctaggaagtcagaactatgagacgcaccttggttcccacaatagccgtgctaagggggtactggggcgacggctgatcatgatagtgtatgtacggagtatgcggttcaagattcaggatggattcgagatagatttagatcgagtgggtttgcagtatcaatgaaaatagtccatgaaaagacaatgaagtgcacaccgatgttgatctgcactccaatggaatcttgaaagctttattgataagggagagatacctacatgtactccggacttgccagctgagatcctgcccgagacctactgggcgcaacgctccaacccctgatggctttcttcttcagccctggactagaaacactagcctgcaggtgcccatctatgatgaatgtgtctagggtcatcttacaagaaccagaagaaccccggacaatgactcggaatgaaagtgatacaacagtaatggcgccattatcggtcttgatatggtcattgcgggaatatacctcccacaactgcccatcggtactctatactccgtagagacacaatctatatccctggaggaaaaaaaggagagtctccggggtcatctcacatgttaaagcctctcagcaccgccacacgaggagctgacgttgtccgacaccagccacagtggcggtgactcctcccagccaatcagcggtcacatgtcaccgctctttgcacgtcttcctcctctggcgctatctcaccagctgatcaacagcccatgcagactacactacaccccccatgtacctacgtcaaaagagtctggattattcctttttcctttgccctttcgccggaatctaaatataacaatgtgatctccctttccctgaaaattctcttccggatccccgcacatgcagctataccgcaaagatcgactttggcgcccaacagcgttcgagtgcgtgtgttgtgagctcatcgacttggctagtctctgatacgtgtcggtctcctcaagtctcatccaattattcttccctatagctctgtaatctgatcctgtttgttgctctgcccaacgtggatgcgtttgacccccccagcctccgtgtcccgcatcacttctccaaggccttagaccctcgttgttactccgatcggtccttttgtgctgatcaaggcctgaggttaccaacccaactgctttattaaccgagagctctccagggctgtaccttgcttattatcctataccctgcttagctcttcgatacttgatctataccccggacaattccttttgaaacagtctgtgtccccttcaccgcttccttatcggctgtcgatctcgaccatcggatgactgattttcggtaaggtcgtcgcaacgacatactctctgctatggcaccttttggtcaaacgatcgctgtgattgacaagaccggcaaggttgtgagcacggtaagttcgatctccggcggaaatccgagcattctgaccaggattagagtaagcaattattcggtgttttcacccatgccaaaaacgcctatcgggagcgcaagtctgccttccaatcagaacgcaatgcaaaaattgcagagcaacaagcactcgaaggactcgccaactatcagatcgatgattcggtagcctcttctgaacgaaaccatgggactcggtcaaagcatcacagcggccacggtcgaagctctcattacgggccatcggcagcaatggcccgccgtcacacctctcacgatgtgtcggtccgaggtgcccctcgtccaacgggtcggtcaaaatcggatgcgcatatcgacatggatcttgcatacggagacgcctctcatgcagccttatctcgatacaaccccccagagcccaaaaacgaccaacaacagcttgatgttcttgtcaaccgtgcacagtggattcttgaagaagcacactgtttgcatcatggtgctgccgcgaccatggcccatctccagcagaacccaaaagccatggccgccgtcgccttgactctagcggagatcagcaatctggcccgcatgatggcccccaccgcattagcctcgctcaagtcagccgcgccagtcgtcttcgctcttctttccagtcctcaattcctcatcgccgccggagtcggtctgggcgtaacggtcgtcatgttcggaggatacaagattatccaaagaatcgcagccggtgctatgggagagtccggcaaaacggaagcagaaatggaagaaatgatggagttcaacacagccgaaatcagttctgttgagacgtggagacgcggtgtcgctgaccagcaagtctacagcgctggaacatctgtcgaaggcgagttcatcacacccgtggcagcggccatgtcgggcattgatgtgacgactgctcgggcgacacgggatcctcgtttcaaatttgatgaagatgcctcggtcgcttcatcccgtcgctcccgtcgttcacgcaccacccgcgctccggatcgacgcgatcgaaggtcaaaagctcctttggaggaaccgagtgggatcttcgggcgaagctcctccaagtccaaggcgccatcgaatgtccccagccgcacctcatctaaacacggcacctatgtcaccgaaactgagaaaagggagaaggagaaaaagaaagctcctagccggctacgccttatgttcacctcttccacttgacacccaatcctctccattcgacagaatcataacatgtatatccacctgtctacgctcttccgatgttatttatgggcgcagatgcgtttcatacggcccattcagtgcctttgatccactcaactcttacgacgacccatgacatatgcgtcacttcctcccattcaatatttctttttggatatggttgtcgctcgctttctatttttcttcatcttcattttccttcccttcttctccttcttcttcttcctcttcctcttcctcttcttcctccaactactttcagctatgcagccccttcacgcaagcatattttggtgttcattggcggcatctgctgtattatacaaacaccaaagaatcatttagatgaactacatatcttaagaaaaaaaatattttctatcatacatattctgctacgtgttcttacactattgatgtctaactcggatatacatgtacaatcatcccatccatcaattgccaattaactggtaggcaagttcgtctaattgaccacaagagtgccgagcctctacatataaagtaagaatagagatgtaggtaggcgcagaacacgctaatatatataatagtcctgggttcatatggtctgaggtagattgatagttagcttccagctctcataagtgatagttagggagatcttagtctttatgaggtagatggactcttgtcccgtattagcaatgacctacctcaaggagacctactccgattaagttagatcatgacttccagctctgagctcgagacagagaacggtagaattcgatccagctgtctgtgatcgggagaccaagcatcgagcatagaatatatacactaattcatctaccatggcgccgaggaacctttaacaatgctaaggctaggtaactctttgatattctgaatactagtcatggtgttctcaaagaaagccaatgatcgacatcgtaaaccccttggtggatacttgcacccaagctcaggggcacagccctctatgctatttatgttgtagagctttgaagatagacaatctatacagggaacatctacatttgaagagatagagagcgtgtaatcagcaggatagtcatcgaaccccagtcataatatccaacggcaatgcccaatccatatatctgctgtgaagcccaccaagatgcatcatgctacaccaaaacagccctcgcagggatcgaagtgaaacccagtctcattaaggccccccgtgggagaaatgatctgacgttagccggcagatgaacggtttccaaacagccggaggtttcagcatagaatatcccccattggctaattccatgctgacccctgtctactcccggggaatcggaggtgcacgccataaagccggagattattacatagtatgtatgaccatttttcccatttcccatttgggattgaggctggtggcggtaagagaatgtatcaaatgcagcatactccctaggatctgctttaaaccctcaaatattcgacatttatgcaatgctgggtggcccggagggacccgttagcccccacaggaagccgcaaagtaccctcgcttggccaaggacccaaatgctataagggaatgatgtcccctttctgattcctccgatatgggaggggcatggagtagataagagggtgagatgtggatcagtgcaggctctagagcagctcgggatctgataattgtatgtttgttttgtgagatttcgcctcgttcttgaaatagcgcaatcttttgaacagacatactggaggggtaatttcgtagagtacttcaaggcctggtttgccagaaatctagtcatttgatgtatttattctcatcatacattgctccaatcctcctataacggaagtttcaagatggagattccaagggcaaatgtgcctttagatgtgattgttgtcgggtaagatttccgttgtgcatggttcaacatgcgagattgtcatgctgatgttttgtagtgctggtattgtttctgaacgccgaagagctgcattggctcgagacaggagttgtattaaccatgattgaataggcatcggcggtatggcggcagccctcacattaggtcttcgggggcaccatgtcattgtccttgaagctgcacggaaggtatatgtcgaccgaaattcatagtatatcaagcaaggctaaccaatcatggcagctcatggaagtgggcgctgggattcaagtatcgccaaacatgctgcgtttattcgaccgtgagtctgccttctgccagaaaaatatccatgctaaaccggtacagggtggggagtctcggacttgattcacgcccaagacgtagccctagagcacatccacgtccgaagatgggataacggtaaactcctcgacaaggtgccggtgaataagactttcgggcagcaagtcgttattcaccgcgccgacctgcacaacgctatcatcgacagggccctagcgttgcccaacattgagctgcgtgagaactcacccgtcacagacgtacagttctacccagcaagtgttagcctagccaacggcgaaatcattcgtggcgacgtggtaatcggcgcagatggaatcaagtccacgatccgtagccacctgctcgaagactcgactattaaagcagttgcgactggcgatgcggcataccgtatcatgatatcccggcacattatggagaaggatcctgaactgaagaagctcattgacgagccgcaggtgactcgttggcttggtccttcgcgccatattgtcgcgtaccctgtccgcaagcacgagctgtacaatgttgtcctccttcaccccgatagccatggtgtcgaggagtcttggaccacgaagggttccaagcaggctatggttgacaactatcatgggtgggataacacggtgcggaaactgattgatctggtcgatgataatgaagttttggagtggaagttgtgtctgtaccgtcctctgagaacatggatccggggatctgtcgctctaatcggtgatgcgtgtcatcccatgctgtatgtgctcctgagatttggctgttggtttcaagactaatctcgccttagtccgtatattgcccaaggtgctgcccaggccgtggaagacgcggccgcgctcggtgtaatattgtcggctatttcatcacgcgaggagattccgcatgcattgagtgcttatgaaaggtcccggaaaacgcgcgctgagacagtgcagcactctggatcgaagaatcgaattacgttacatttgccggatgggcctgagcaaatggctcgagacgcgctgttcaaggcttcggacagcggaagtaaccccgataagtggtcggatcgtaggacacaagagtttctttggggttgggatgcagagaaggcggcgttggatacttggaatggtatgttccgttatttcctggtcatgtcatgtgctaacttgcggacagaagatcgaggacagaccaggctcaatgcgaatctgtagattttgccgacacgatacatcacctgctcataatcggttgtggtaaccataaagggactcgaattagagtagatatacttagagatagaaatattcacttcattagacgcatgagtgagctcgttcaattcatacaagacattgcatttttgctaccaattccttaagtgttaatattttctagttcattatacagtcattcgagcccaagaccatccatcagacatcggtggaacattggacaggtagacttgacatgttggcccgaggaagccagggacggtcaacatttggcattccaatcgttcaaaattgaacaatttacaacctctcgccagcggcggccttcatctgaccgtacttcttgagacgaatggcagacacattgatgaagccagtggtctcggcgggggagaagtcaccgatctcatccatggaagactcgctcatgtcgtagagcttctctgtctcggaggagcgaccgagaatggaaacggtgcccttgtaggcacggcagcggacctggccgttgacggacttctgggaagcggtgatagagacctcgaggaactcgcgctcgggggagaagtacatgccgttgtacaagagctgaatatgttagatgagaaaatagaatcatggaaagctcgtgcttaccttggagtagttgtaggtgacgaaagtatcgcgcagagcacggacctcacggtccataacaagaccctcaaggtcactagacgcaagttagttgtgccataagaaatttcgcaatacaatactcacaggtgggcagagcgcaggcaggtaagaccgggggtctcgtagcagccgcgggacttgataccgatgaaacggttctcgacgatatcaatacgaccaacaccgttgcggcgggcaatggcgttggcggtgaggaagagctcgacagagtcggtagcaaccttcttcttgccaccctcagtgtactcgagcttgacggggacacccttctcgaagtagacagtgaaatcttcgggctgatcgggggcggtcagggggtcctgggtcagcttccacatatcggcgggaggagtggtatcggggtcctccagaataccggcctcgtaagagcagtgcgcaaggttctcatccatagaccagggcttagacttagtggaggtgacgggaatacccttctcctcggcgtagtcgagcaaatcctggcggcccttgaagcgctcgtagaagacggggtcgcgccatggggcaatgaccttgatgttaggctggagggcgtagaaggcaagttcgaagcgaacctggtcgttacccttaccagtgcagccatgggagacagcgaagcagccctcgcgctaggtttgggtcagtatgacatctttctgctagcagcgaagtaaagcgtacctgtgcgacctcaatctgggcacgagcaatgacgggacgagccagggaggtaccgaggaggtagacgttctcgtagacggcgttgcaagcaatggcggggaagcaaagctcctcgatgaactcgcggcggatatcagcaatctcgcacttgagggcaccaatcttcagggccttctcgcgagcagcctcaaagtcctctgcaaagggttattagaccggggttggatgataggtcgacggaattgaatttaccttcctggccgacatcggccactatgttcatattagtagttgatcttgattgacatggcattgaatcgacttactgaaacagacgacctcatagccctcttcgatgaggtacttcactgaaattcggtattagtatcctcaattggttaatgggttgaccgatgttcatacagatgcagctggtatcgagaccgccggagtaggcgaggcaaacctgtgtcgaactgtcagaaagtgtggatcgggtggcggtgtaagatagaatggggacttggggatctgataagggagcgaaagcaatagttcatacctttccctgtgccattgtgaggaattgaatcaaattcaagaagacttaagacgtggagtataaaacaaaggaagattgagtcattggaaaaaatgtcaattttggtgcgggccggggaagtcacgggtccgagatgataaccctgataagatagatcgttgcccctccaatcttcgtccaactcaaattcgagataactgctccagggctagaacaggcttataagtgatggctttcagacctttcacaaagagatctaagctgtgaagctcattatgaatagtcaagtccaggattcattctgtttcccatggaaaagacgagcaaagatgtatgtttcctttcaagataccattgcagaatatattgagtccgatccattggaaggcagtgcataactagcgtatagctccgtcattctatgttctatgttttacattcgatattcatatttgcatgatactgtcctttatcagggatactatgctgtatgttgacttcgtgataggtccggtctgacttgtgtgactggtttgccctgtttgcatcatctcggctatccgcggcggtttccccgcgcaatgcccccgacaatgaacaaggagcaatttaaaggcaatcatccctacaaaaaaaaaatattatgtatttccattctgttcacatcccacaattctagccaaagatggcttctttacgaactcctttgcggtctttcgctcaagctcctcgccggttctactctggagctcctactccggcagcgaagctaaacctacctattgactacaaaaccactccgattttacaccacacctcagcctccttgtcaaatacatcagagtacccggcagctgccacgagtaaacgactcaatctctaccaagcaatcaactcagcattgcggaccgcattgtccaaatccgatcgaactattgtgtttggcgaggatgttgggtttggaggcgttttccgatgctcgatggatcttcaaacagaatttggatcggatcgggtcttcaacacccccttgaccgaacaaggcattgcgggttttgcaattggggcagcagcggaagggatgaagcctatagctgagatccaattcgccgactacgtgtttccagcgtttgatcagattgtgaatgaggcggccaagtttcgctatcgagagggtgggacgggcattaatgttgggggtctcgtcatccgcatgccgtgtggcgcggttggacacggtgctctgtacgttacgtggagtgccaagcaaagcggtatgctaatcaactgatcgaatagataccacactcaatccccagagtcgctcttcgcacatattcccggtttgcgagtagtcatgccacgctcccctgctcaagcaaaggggctacttctgtcttctatcttcgagcacaatgatccggtgatcttcctggagcccaagatcctctatcgtgccgctgtggaatatgtcccgaatgaatactacaccatcccgctaagtaaggccgaagtcatcaagcctggcaaggacttgaccgtcatctcatatggacagcctctttacctgtgctcttctgctatctccgccattgaaaaggctatgccgggtgttaatgtggaacttattgatctgcgaactatatatccctgggatagacagactgttatcgaaagtgtcaaaaagaccggtcgagccattgtcgtgcatgagagtatgatcaactacggcgtgggtgcagaggttgcctcgacgatacaggagagtgcattcttacgtcttgaagcccctgtcaagcgagttgctggctggagcacacatactgggctgagttacgagcaattcattctgcccgatgttacaagtgagtgcccaacgcccttcattcttcatttcgttctatcatcactaacccatagtattctttgtaggaatctacgacgcaattaaacaaatacttgaatattaaactgggatgcctcctaggagattataatgatacgaaagccatttttacctgagaacatcatccacttgcatttcaatgattgtgaccaggtccaaggaattctatcaagcaaaataacaatgccaaggtgaactttgcttactcgcaatagtctgtcttgttctcaatggcttcacaggaaatattaaatactgtttctagttgccagaattgacacggtactacaatatgttgttaactatgtacatcttattattttcaaggtctctcgaaaccatttatattatatctcttctttcaagtatatgggtgtttgcattgtcttccctttctggctgttccctcgttctcacgtgtccatgtgccacttttcaccgtcgagcgccttctttcccatcttcccaagctctttaccttcttcacttaaccccattcaacttaaatctatgtctggctcctatatcttgttccctcacttgtttcacgatgacgatacaattgatgatgtgactcttgctcttttgcaatggcgatcagcgcttcgacagcaaatgagaaccaacaggacgttctagcggccacgaagatatcgacacaacgttaggaattaggtatcttgcgggagtgcactacttgttcggaaagttatcctgagccggacacgattcggaatagctgcccacacgtttactgccgagggtgtgtcatccgccttctccaaaacgctctggctgatgaaagcttgtctcctcctcgttgctgccgttctcctttgccgttggaagctgcgcgtggcttcatcgacgatggactgtgggagggatttgaagctggatgcctggtttcattctcaaatgctggaattgtggactccaagcatgcaatttctgccgatcgaacaggctctaattgacagcccccttttctcaacctactttgatgcacagggtcagtctccccttccccccgggtcaacgcctattctcactcaaagcaattacagggaattggatctccgaaccaccaataccaaaaacctcactcgaggactttgtcacaacaatcccaccgggggaggagaaatatcagtttttacgttttatacggaaaattctgacctgggaccaggaagtgagagccaccgcgaacgaaattataccggacgaatggcttatgaggctgctttgaggggacgctctagggagaccctcgggtgtattcggtgggcataatatccctagttttcagcattgtctgttaatggattctacaatatatctctttaataactataaaaataatactacggtaacctccaatttgcaatatctacagggttaccaaaaagctaattgagaactgtggccagtggtagacatacataaagtagttagcaacctcggtgaccgtgttgtctttaacaagacaaccagtttgtgatattctagtcttgaaagaacatatagtcatgtatgccggaatatgagtaaaaacacggaaacgcgatataaaggcccaagaacagccctttcagccctgagcattatacgcgcaataatcgaaattattcgcacgattacctgcccacgtcgggaaagcaaccgagttgccagaaccaccaaaaaccgcaaatgtagccaggaacaccatgacttgggtgccaccgtccagcgcagcagacaggaggtaattccacttcacaaaccactgcggtcggtaacggcgcagatagaactgaccgaacgcgccgaggatgtagtagctagtgagagaagcgttcagaccaacgaagagttctccaaggtaccacaggataatggccgagttgaggtatgaccagattcgctggtgcgggaagagacggtgcatgatgtagaagggcaatggggcgatgaagccgactaggaaagctgctgtgacccattcgtagcgcgcgccgatggagaacatcttgggtgcgatggaccatgcaatggcgagagtgttgaactgctggatttgggcgccggaccagatgtttgttccttcggcggtttcgaggatggttgcttggttttggacgatgctggagaggagttagactggatgggaatcttataccggggtaggtaagggatgggacttacgttatcatcatcacatagttgagaagggcgcccatgacacagccgatgacttgtgtgacgaacgtcgctttcggtgacagtttgttttgttgggcgagtttcagatcacggagaagcagccacccttgcgagagaccgttgtaggtgtatgtggtgaagtacatattagctggagagttgtcagtggaatgatctcaaaagcagtcaaagtagtggagtgtatacctaaaggacgtccgggcatcatgtaaccagcaatcatttggaaaatcggctgcaagttgtatccgaagcccgtaatggcatactgcgccccgaagaagaccataaaggtgacgaggaagatggtcgcgacaataaagccccaccacggaagggtggacttcatcacgtataagcatatca
